United States Patent Application Publication US 2025/0295137 A1 - sequence listing, part 10

SEQ ID NO: 10 - DNA, 1762424 bp, Latilactobacillus curvatus
  source 1..1762424: mol_type = genomic DNA
attaaagaaaaaaagcgcggtagatttgtaaaaatctaccgcgcttttttggattaagcaaacattttcttagttgcgcgcatcaatgtcttgatgtcacgatcataacgtggtgtatcgactaacttggccattggaatgccagcgaagtgataagctgcaatttcgccagaacgaacagcactttgttcagtgaaaatcatctgataaggttgttcaacgaattcaccagtgaaggctaagttggttgaatgttcggggatgacttctggacggtcagttttggcacgattattaaagagtgctgaagcatatggcatatagacaggaatgttattgatgacactgtccataatttcagcttctttttcacgaatattgattgggccaggatcaacttttgatagttggccaattaattcttgaagcatttccttacccgtcatttcgatgtaaggtttatccacaaattcaccgttacgacgtgggtagaggaagtaaccccagataaccgcttcgtttggtttttgcgttgtgaagtgtggttgatggtgaacaacaatcgacatattcacatctttttgaccaagtggtgtgattggttgcgttgataggaacgaattcaaagcattcccaggaatttgcgttgtaatccgttcgatttcgtttaacaaaatatgattcttagtcgttaaagtgaagctgacccactcactggcattgcggtcagcgaagaatttatcgggattgccaagattatagaatttagaagcgacttgtttccacagaccggcagcagcaccataatccatgttttcagctgctggtgtattataatcgccaagtgttgcggaatcggtaattgacccgtttgtgaagatgaccgctgtgtcgtcgtccaccgtaacgtgttcaacttcatctgtctcagtattagtcattgtcataccagtaaccgtaatttcatcggtcatctgagtctctttaaagtctaagtcagtaatccgtcgattgaggataatgtgacaaccttgcgcttttaagtagttaatcagcggcagcatgatactttcgtactgattgtaacgtgtccggttaacaccgactaagtgttcaatctgagtgaattcataaatcatttggtgcatgtaacggcgtaattcttgtgcggaactttgggttctgaaagcaaaggtggtttcccacatgtaccagaagtttgtttggaacatatgtggatcgtccttgaagtattcggcaattgaaatgttgtctaatttttcttcttcagaatcgggcatcataatcaatttggtcattaataaccgatccttattattaaagccgagatgaccagcatccaaaatacctttactaccttctaataaacgtgctttgtcgaatgtgcggtgttgagcatcgaatgaacgggtatcttcttcagccgtcatattgggttcagttgctgaaggaatccgacctagaagatccattaaatcgacataagtccgatagttaagcatccgcccaccacgtgcaacgtagcccttagtattttcgagaggatggtttttattccaatattcatcggttgtttcggaaactgatgccccatcgtttgaaccatggtcatctaatgaatagaatgtaatcgcatcgccagaccaaccgccttcttgaattaaatagactgctgcggccatgttagaaaggccagcgccaatcataattgcttttttcttaatcatatgaaaaacctcctagattcagtttagaaatgacgagtgactaacggctttcgaatttttcgtaatccacagaatcgtctctaaaaagttccattttcttagctaataaacaagcaccggttgctgtaacacctacaaaaataaggctgcctaatagaaattttttcatgtttctcgcttccttccattaactacttttgatatctatattataccgcgaattcctaaaataggaagataaaacccttacataggaattgtcagtggtcatgatacgattattgatgggattaggccgctaaaaatcagaatagttaagtttagtttaaggctcttattagtcaggcataattcctagggaagcactaacggatttaaaaaaagtgataggcccccaaataatggttgacctcaagtcagcttgaggttgtaaagtagtcttattgattagaaaaaggagacttttaaatgcaaaaattatctgccttaacagccccaatgaccttaagcaacggtgttaccattccaggattagggtatgggacatatcaaacaccaaatgaagaaacgaaaaaagcggtcttagaagctttatcagttggctatcggcatattgatacagctgccgtttacggcaacgaacaaggtgttggtgccgctttgaaagaaagtgatatcgcgcgtgaagacatctttgtgacaagtaagctatggaatacagaacggggctatgatgctacgaaagctgcctttgcacaaacaattgcaacgttaggtgttgactattgagatttatatttaattcattggccagctaacactaaacaatttgaagccaaagatgctgaattaaatgctgaaacttggcgtgcaatggaagatctatataacgaagggaagatccgtgcaattggtgtgtcgaactttatgccccatcatttagatgcactcatgaaaactgccgttatcaaaccaatggttgatcaaatcgaagtccatccgggctggccacaagcagaagctgtgcgttataatcaagcgcatgacatcttagtcgaagcttgggcaccacttggtgaagccagtgcgctttcgaatgaaacgattgcaacaattgcgacgaagcacggcaaaacggcagcgcaagtttgccttcgttggggggattcaacaaggtgtgttaccattacctaaatcaactcatcaagaacgaatggcgcaaaataccgatatcttcgattttgaattaacagatagtgaaatgacccgaattagtgctttggaaaacttaggcggtcaatgcatggtgccagatgacgttgatttttaagcaagtataaggaaggttaatatggcattatcaattggcgtagtcgcccaacaatatgatttgagtattccgacactacggtattatgaagaacaaggattattaccgtttattaaacgcagtccggctggtcggcgtgaattccggcaagctgatttagactgtttatgtgatattgaatgtttgaaaaaaaagggtatgcacagttaaaagatattaagcaatacatcgattggcgaactgcaggtgatgaaattttggaccaacgcttggcgttgattcaacaacggcggcaaatgttggctaacgagattgaatcactgcaagcagaattgacgaagctaaatcataaagaatggtattacacaaaggcacttgaagccggaacagaatccatttttacagctgactgtgatacagaatatgaacgtgcgcatcaataatcgaaaaaagaggcaacctgataggttgcctctttttgtgtgtttaaacggttaatgttttttgcataatcagatcacgttgtgcgtcgcttccgagttggaagatgtgatcaccaacttggctgaagccgaggtttttgtaaaagttaagagcagcagtgttgtgttcccacacgccgagccatacgttagttttatggaattgttgcgccacggctagtgcatggttaattagttgtgttcccaaaccaagtcgcttaaaggactgtcgaatatagatacgttcaatctccagtgaatccggggcagctttttcagtttgtgcgccatcaatgttgagctttaaataaccagcgacttcgccatcttgataaataaaatagaagaacgaatcgggattctcgagctcgctagttaatcggtctgtattataagcttcttctaagtagttagcgagatcttctgctgcattttcagcgccaaaagttgctgtgaaagtttcacggctgatggattgtaagtcaggtagttggtttaatgtgacagcttgaattggcattgtgatgcctcctttgttgtaatagtgtcggacgtgtccctttttgacaaaatcccagtttgcggcaacgttggcactaactttgtttaggagtgcttcaagattatgggcctcgtcggtcgtcagtccagtcagtgccatttgatttgaataatcgttttcagctttgatggcgggatagacggctcgaccggcctcggtgagatagagatgtttgatcttacgattggttttgtcagggtatcgttcaactaaaccatgcttaattaattgttgaacggcgcgcgtgactgttgcgcggtcgacttttaataattcacctagacgttcttgaatgatcccaggctgttctgtaatgcggactaagtaaaggtattgcccgcgggttaaatcatattgttggaattcaatattagcaatggattccaacgcgcgggctataaccccgattgggcggagaatttcagtcatgatggcatacctcatttcgataaaaatagtataaaatatttttgttgcatttacaacaaaaaataaagcttcgattcgttaagtacgccaaaaataagaatataattaattctcgatgggaatatacgctttcattttaaaattgataaaatttcaaataaatatatttaataatgtgaacctgatgtgttattgtattggttgcagagcaattgattgtccgtgatgaagttggcgtctattaaaatcgaacaacaataaggactgggtgaagactacatggctttttcagattacataacaaggatactcatctacacaattgtgtcgtatccaatcgtcggggggttatctttcattgtttccagtctttattactggttatttttagaacgcaaagatatgccacgttacttagaaaaagggacgccattcattactattttagtgcctgcgcataatgaagaagcttcgattgaatcgacaattgaacaccttgaagagtgaatgaattatccaaccaatcagtatgaagtgattgtggtcaacgatggttcaaccgatcaaacaggtgctattttgaatcggttgcagactcggtatggtgagaagcgcttacgtgtgattacgatcattaataatcgtgggaaagccgctgggtttaatattgcactcggattttcaaaaggccaatttttattatcgaatgatgccgattctaagccggaagtggatgcattgtggaaatacatgcactatttcgaacgagaaggtggcgatcgattaggggccattactggcaatatgttattaatcaacaaaacatcgttggtagctgaagcacaacaaaatgaattgaactcgatcatcggactgattaaacgtttgcagctttcatacggtggtctatttgcattttctggtgctaataccatgtatcgtaaggcggcggtcttagatgttgggggttggcaagcggaacaaccaactgaggatatcgctatttcttgggatatgcaggtgcatgtttggcaagcgtatttcgcaccacatattcgcttttttatggatgtgcctgaaacactgcctgagttggtcaaacaacggagacggtggactgccggtgggattcatgtgttgttaacgaaatcgatggatgtctttagacacccgattaaacatttggcaatggtacccattattgttgattacagtttaagtgttatttggtcgctatttttctggttaagtatgattgcgtttgttggtgttcaggtgttgtgcttggtccaaggggattggtcacgtctaattaccaatttctgctttgcagcgatttttatttcaattgagattgtggtgggcttaattcagttgattatggcgtcttactttaatgaccgtggacgatcattaaagtatattgcgtttgcgccatggtatatcctaatctattggatggtgaatactttcaccgtggcggttgaaatcggaccaacgattattcagattcttaaaggcgaggatgctggcgtttggaagtcaccaaaacgttcggtagaggtcgtcgctaagacaaaagaggagggcaatcaagatgactaaaccagactatatcacgcatcaagtgagtgaggcatcgttgacgaatgattggttttttgctaagaaaaagacgggcaaaaaaatctggcaggggattctgattgccattggatggttaatgtgtctggtaccgatgaccattacgggggtcttatatactgtcaaaagtgttccgctaccagttgacttaatggcctttagaaggatattattacagactaattattactttttattatacgttgccgtatttgcagtcttctttttagggctttttctattgaataaattacgaaaatatcgtttgaaaaaaggtttgctgcggatgtatgatccgacgcgattgagacagcgcatcgatctagcagaggatatgtacttacaaaagtatggtccattagacatgcggcacgaacaaccacagattatcattccagattacacggatgtgggcacctatgaagtacggcaaagatttgattattttgaggaggaagaagatgctttctaaaaaagatcaagcaattgtcgatgacatgattgttcgtgagcgaaatatgaaaaaccgccaacgcgtgattggggttattatgcataagcgacggttgtttaagcaacgtttagtgatgtacgctgctattttaacaacggctggtttttgggtgttatacacttcttttgcacgatacggtaatttatccgtcatcaatattattcaagtgaatgttttgatgaccgtgattttactattcttcaatttttatatttggcagaaattggtgcgctataatccaatgcaattgtttatcaaacactataataaccgcttgcgtgtccagtatgcaggggcattgttggcgtctaagcggtggttacaattttattatcacaagcgggaaatttcgcgaatgattccacagattttgtattttttacatacaaaaccacagtttacatcgatcgatgaagtaatcgcgtatattgataaacaaaacgctaatccgcatattcatcaaaatgatttgcgcaaatttcagaagttcgttaatcaaacaaatgaaatgatgctcagtacttcggatgaaaatgggcaaccttcaagccgccaaatgcggtttatcgtgttggatgatgcaccgaatatttggtattttgggacagcaccggatacccctaagattgaagaactcgatcgtggtttagcggcaattcacacaatgccaactagcgaaggaatgacgattgctagcagccggttgcgtgtttatcgcgcgcagtacaagttagatgaattagctgattattacaacgcccaagtccctgggtttatggatagtttatcagcagaagatcgtgaacgggaaattatctacgcaattgaactgaaaagtgcgcgcttggatagttggacgcagcatgaagaagtgacttttataaatgactaataaaaagatgacgctgaatgaattcggcgtcatctttttaaatatgataaggaaataataaggaagggttctctgaaatcggcttctaaagtcgtaaaaggcgcttacaaagcctatattttatgatttgttaagtaagcataatgtttatgtaatgttaatgtaacattcgccctatatacttagtctcagagttcgggcttaactaataggagaaaataaaccatgtcatttaaaaaaacgattacgactacaattgctcttggattattaacagcttcagttctttcaacaaacgtagtatctgctgcaacttcaagtgaagcacaagaagcgattactgctaataagaacgcaacaaacgatttactcaaacaaatcgaatcagctaatatagaagtgattgggttggatcaaaagatttcaacaaacgcttcaaaaattgctgatcaagaagcagcaattactaaagcaaataatcaaatcgaatctctttcaggtcaaattacggatgctcaaaaagaagtttctaaacgaacagtcgtattgaagaaacaattagtggccttacaagaaaagagtggggatgctgtcagcgggaacgtatatgttgacttccttttaaactcaaatgacctttcagatttagtttcgcgttcattcacaattaataaattaaaccaagcaagtaaagaagctttagatgatgttaacagcgctaaggcaaaattaagcggcttgaagacagaacaagaaaatactaaagcaagtttagttgctactaagactgatttagaaaaacaaaaagcaaacttagaatcattgaagagtgaagctgatcaaaaacaaacagctttatcacaaaaaatcaatgataacaaagacgaattaacagctttacaagcagacttcgacaaagcaagtactgaagaagcagacgctgctgctaaaaaggctgcagacgatgccaacaatgctaaaaaagacacacctcaacctacatcaattgacacgccatcagataataagggtggcacatctgttttcggtggcagcggaaaagttgctggtaattcagctgggaattcatatgcatggggtcaatgtacatggtatgttaagtcagtagcaccttgggctggcaataactgggggaatggcgctcaatggggtgcttcagccgcagcagctggcttcacagttaaccatataccagcagcaggcgcaatcgttagctttgctggtggccaaatggtaggttcttgggccgcagatgggacatatggtcacgttgcttacgttcaatcatacgatgccgcagctgggacaattaccatcactcaaggtgggatgggcttcagcaaccctgctggtcctaacacccaaacaatttcaaatgccggggcatttacttatatccataactagacattaatgattgaaggcccgcatcctagatgcgggcctttttttatgaaataaaatcaattttataaacaaaatataaatcaaatctagaaggtcatctgagtaactctagtcataaaaaggtatttattgatgtggattttggtaaattgtaaatgaatcactgccgaaaatcttgattgtcgtagaagtttttaaaaaatatttactttttatgaaattaagactataatgacttgcacaaaagataatagcgcgatgaactagataataataattataatattgcttaattataagctaatttattattagtaaatgttggttttacaaatgatggcaacagagtttagtaggagaatataaaatgactgaagataaagcaaagaaagatttaacagatttgttgattgggtcaatgcaatcaaaacgattcaatttaaactcaatcaaattggtgaagaatatggtgttagttttgacagccatttaatcttaaagttaatcgaagaaaagcaagcgattacgccaggacaactcgctaaggaaattagtggtggcgctcctaaaacgtcacgcaagatcaacactctttatcggaaaggtttgataaccaaagaatttgggacaccagatgatcagcgacgggtatcattggcggttaccgacaaagggagagaggtattagcacttgtcggtcaggcatatgaagattgatacgcaaaccatattgatgaaattctagagataaatggaaagttaaagtattagccatcacaaaaaaggcataaccacttagttggttatgctttttttgtgtgcatctaatagttttgttcgttcattcgttaaaggggtacattaaattcagagtttggtatactgagggaatcaacaagtatctaattttgttgcggataaggagtaagatgatgcatttggaaaaacgaacaacctttttattaactggctgcttgcttttgttatcagctgctttgtggcttattttcggtcctgctaagacggttactgaacaggcaatcacgcaatctagacaggtaatttatgcgcgatttacactccctcatctaaaacgggatttgggttactatcaagggttaacgccggcttcttttggacagtatgcaaaggcaacccaatctggaacttacttggtgccagatttagaccaggcgcagatgttgaaaaaaacgccggcaggttacaaagcatatacagcagaaatgatgacacctcaagggggaacagttacgccggactatgtgatcgtttcggcttatgaccatcaacggcaaggcaactcaattctgtccattatggataagcggactggccgacatttgaagaatattattttaaagggccgaccacacgttggtggaattacttatgatcctgaacatgatctcttatgggtttgtggccgtaagaaggcacgtgcacagctatttgcaattaagttaacaactattcgccagtaccctgcagatcagccgcaaaagccgattcaataccaatattcaacgttgttgaagtcgatcacccgggcttcacttgttagctatcacgatggggcattatgggtcggctatttcaatattttcggggatagtaacgtccagtcgtttcaggtttcagcggtcattaaaggacgcgaaaaagctggtgttaaattgacggcgcggaatatccgcagtaatgaacttaaaagtgaacaacgttggcaagcagtggataagattcaagggctaacttttagtgatacgcgggcttatttttcgcagtcctacgggttagacgattcatggatttacgtttttgcaacgactgggcggccccaacaatttacgccagaaaaggcgctacttaagattcggatgccagctcatttagagcagattacgttggatggcaatcggttatatgcggtttttgaatctggtgccaaagcctatgcattaaatgctaaaacgcggattggtcgggttgtatcgtttgatattgatactctggtaaaggaggcaaagcaaaatgatgatgcaaaagctcagtaagcgcacatggggattaatccttgcgagtttgatctttgtgttaacgcttttgaatacgaatcaaccactgttgcaattatttaacctagactttgcgcagttagccgcacaaccgtggtggttacgtcttctaagctttgcttattacttggtgttagtcattgcgctaggatggtggttgacgcgttttgatggtttatggctggcacaagaaggttcatttgggcttcctagttggcgcaatattcgtggggctatcggtgcaattgtactcctttgtggcattccaatcgttggagcccttttaatgtatcaggtactgcttaaatcacttgaagtcggtctaataaatgattacgcagccttgatttatcagaaccaggtctggccgacattagcatggttcttttgttgtcagatattattcattagtttgtacatgatggtgattattacgactggtcagcttgtgaatacaatcttacaaagtctacgggtatccggttggttcttgcgcttgttaacggcagtcgttgtcagttttttaatatttggcacgttatcgtggcttgcggttccaagtcaagaactgctcgattggggcagtttattggccttatatcattttcaaaagcaccgtaatttttggacaagtgtcgcgattgttctcattagtagcatgatttatctgatgatttcattattaccaattttaacgtaacaattcgggaggaacttatatgcgccgtttaacatcatttttaagggctaattatcggctctttagacaacattggagtgtttatttattactgctcgtcattacgaatttaattattggcagcttggtggcaccgctgtttacgtggcttgtagaacggttggtggcactcaatggcgtgacgtatttaacctacaccaatctggtgccggtgatgatgcgtcatccgcttttactgattagcttactaatcattctggtcttgatttgcgcggcagtttatctgcaaatgacgttcttgttgcgcagtatgcgccatattcaaaagcaaacacaagaaacatactggatgatttttaaggaaacagtccggggattagtcgctttacggccaaccacgatgttggttggtttactgtatttcttattaatcttaccctttggacaggtcctctttaaatcagcgttgttatccaaggtgaccgttccagattttattattcaggatatgtggtcatcacccaaaatttgggtccccattatcttggtctacgcgagtgcattagtcctttcaattcgcttaatcacgtttttaccagaaacgattgcacatccaaaggcgcagctaagaaccacgctcaaacgctgttggcaagctacccaatatcaggcttggcgtatttttctaaaaggctttgtattaacaacgtcggtagcaattgttggagtgggcttccgcttaattttgtttgctagtcaacggtattacgaccaacacttgccacaccaggctttatttttagccattttgaatctgtttattttagaaatcgtcagtcagattttactcgcattaacggtggtactagtcttacagattgtattgaaccaatatggtgaagttccagcaatggcgacggttgtgcgccaatctaaggtgaaaaaacggactaatttgacgattctccgccaaattggcacaatcggtttaattgttatcgtggctggtggggtagcattgtacaattatgtctatttagagggaatgttggacgatcaaccggccttgatttcgcatcgcggggtagatgatggtaatggtgtgcaaaatacgattccagcacttgaaaaaacggcgcaggaagagccagattatgttgaaatggatgtgcatgaaaccaaggatcaacaatttgtcgtgatgcatgacgataatttaaaacacttggcgggtgtcgatcgcggcgtccatgacatgacacttgctgaattaacggcattgactgtccgtgaaaatggtcattctgcaaaggttgctagttttgatcaatatctagcagcagccgaaaagcaccatcaaaaactactcgttgaaattaagacaacgaatgaagacagtccacagatggtgcaacactttatcgataaatacgaaaaacgacttttgaagaatcataaccggattcattcattaagttatctgattgtggcggaaattaaacaaaaagcaccccaactatttgttagttttattctgccgtataacattacattcccccaaacgccggctaatggctatacgatggaagcgacgacgctcgactcagattttgtgggtcaagcacacggcaaagggcagacagtatatgcttggacggtgaatgatgaggatgtgatgcaacgcatgttatttacaagcgttgacggcattattaccgatcaattatcgacgcttaaagaagtggtcaaggaaaataatgaccatcctagttatgcgacgcgtttatcaatttattcaagtcaattagccggtttcaatggtgacgtagaaaattaagccaaaaaggccttagcaaaatcagtttgctgaggcctttttttgataacgttttaaatgataactacttgtagacggcgagtggtttttccgatagagttaatacttatagtttagttgaggagtaggatgaattaatgcggaacaaaatgacaatgagcgacaaattattatatggcgggctactggcagctgcggggggctttgattcttacacttatttggtgcacggggaagtcttcgccggattacaaacggggaatctaattttattaggaacccatttggggcagatgaaatggtccgtattattacggcacattaccccgattctcgcctttatgttgggaacaatcttaacgcgcattttacaacatcggtttgaaaaagacgaatcgattaacaaacgacaacggattatcttggggattgaagtcttggtcttaacgattgttgcgggaatttcaccgtatgtaccggatattgttgcaagttcacttgtttcaatcattgcggctgcgcaattacaggaatttcgtgaattggatggtggcccatttacatcattgatgatgactggaaatgtacggacgatggcggaaagtttttatgacgctgtttttaaacatgatcgtaaggcagccgataagggctggcaaattttacgcatcattatcagttttacgattggtgcagtgatggtcggactatgtgtctcattcttaggagaacggacgttgattttatcagcattattcttgttgatgacgatgctgattttacaattaaatccagacaagaaagtttagcctagatatgttacgctgaaaggtaacttgccaaggaggttaatagatgttctttttaaaaggaatcttgatgggatttgcgtttgtcgcaccaatcgggatgcaaaatattttcgtttttaataatgccatgtcgaatacaacacggcgggcagttttcaacagtttgttcatctggttatttgatgcgctcttttcactcgtggcgttttatgggattggcgcactgattgtgcaaaacgatgcggttcggttagccattatgggaatcggtggacttttgattttatggattggatacaccattttaaaaagtgcccgcagtaccgttacgtttggcgcgttagaaccaatgccactggagaaggttattttgactgcatttgtggcggtttggggtaatccgcaagccttgattgatgggacattaatgctgggcgcattgcggggtggcatgacgagtagcgaggcgattccattcatcgtgggggttgtttcggcaaccgcgacctggttctttggtatcgccattatctttagccttttccggaaaaaagtttcaccaaaattcttgatgggcgtcaacttagtgagtgccatcatcatcatcgtgtatgggcttggtttattggtcaaagtggggacaacattgctctaggaagggatattgctttttaatttaccctgttggatggtatccttaagtatcaaaacaaagcgaggtagaacaggatgcgcaaaacaacaatcattgttagtttagtaacgctcggcctattgacgggttgtacagccaaccaaacaaaacattcagcaccccccgctcaaaaagaatcgactagtccgcaacaaacggttcaagctccgaaagtgacgcttgaaaaagcccgtgaattgtacgcaaaacaatatcctgcatcagatttaaccgaggttgagctgaatcaatggggtaaccaaatgttttatgaattaacgggaatgaacgacaatgaagagcttcacatgcatgtggatgctcgaactggcgcaaccagtcgattgtcgaaagaagcccttgatgccgatgaacaaaatggcgtcgagcgacaccaaaagcaattagcgtttgaccaattgttgacgcctcaacaagctcttcaaaaagcgcaacaatacttcaccgggaacgtgatcaaatggtcattggaaaaagatgatggccgaacagtctgggaagtagaaggtcatcaaaaacagcaaaaaatgcaagttaaattagacgctgaaactggcgcgctacttgaaaaagaaatggatgattaaagcagtatgtaaagcgccgtcgagaataatttcgacggcgctttttttgtagcttgcattaataaatttgttatcgatttgaataaaataaattagcattgcctaactttttatttacatttcattaaaacggcgtacaataaaactgttatcaagatcaaaataaggagtgaggataatgaatcaacaagaaaagggcaagaagcacaagctgattgaatatgcgaacggcccatcacttgaagaaattaatgggacggtcgaagtaccagagggcaaaggcttttggaagatgttactagcgtattcaggaccgggtgcattggtggcagtgggttatatggatccagggaattggtcaacatcgattactggtggtcagagttttcaatacctgttaatgtccgtgattttggtgtctagtttaatcgcgatgttattacaatatatggcggctaaactaggcattgtaactcagatggacttagcacaggcaattcgcgcacggacgagtaaaccgttgggcattgtcttgtggattttgacagaattagcgattatggcaaccgatattgccgaagttattggggcggcaattgctttgtacttattatttaagattccactgctgattgcagtattcattacgattttagatgtcatgctattattactcttaacgaaaattggttttcgtaagattgaagcaatcgttgtcgcattaattgtcgtgatttttgtggtttttgcttatgaagtagcactctcagatcctgattgggcaggggtgattgttgggctagtaccaactgctaagacctttgccaccggtccagctgttggtggactaaccccattgactggtgcgttagggattatcggggcaactgttatgccacataatctatatttacactctgcgatttcgcaaacacggaagattgatcgcaagaacgaagcacaggttgcacaaacagtgcgctttgccacttgggattcaaacattcaactcacgatggcatttttcgttaatgcgttgttattaatcatgggggttgcagtttttaaaacgggaacggttaaagatccatcattcttcgggttatttaaagctttgtcagatacctcaacaatgagtaacggaattcttgcaagtgttgcccggaccggaatcttatcaactttgtttgccgttgcattgctcgcttctgggcaaaattcaacgattaccgggacgttaactggccaagtcatcatggaagggttcattcacttgagaatgccactgtggttgcggcgtttggtaacccgcttgttatcggtgattccggtattaatctgcgtcatgatgaccagcaataaaccagccttggaagagcatgaggcgctcaataccttgatgaataattcccaagttttcttagcgtttgccttaccattttcaatgctgccactgttgatgtttaccgacagccgggttgagatgggggatcgcttcaagaatagttggttgattaaaagcttaggttggttatcggtcattggcttgacctatttgaatatgatggggttgccaggacaaatcgaagctttctatggtgatcacgcaagtgctgcacaattggctactgctgatcgcattgcatatgtgttgattgctggtgtgatggcattattggtttggatgattattgaattgtataaaggcaataagcggtttgaacagcaattagcaactgaaaattaattggaggttggtcacatgtcagttttagaaattaaacgaattttagtcggggtcgatgactcagaggatgcgttattagcgtttgattatgcaattgagcgggctaaacgtgaggatttagaattagtcattgtatcggtattggaaaatgacgaaatgaacgtctatcaagcattgaacaaggattttatccacggccaatatgaggatcttgaaaaccacctacgagaatatcaagatcaagcctatgtgcgcggtgtgaatcatgtgcgaacagtaattgcagaaggcgaaccaggcgaagcgattatcgaagatgtgattcctaaggttaaacccgatttgttaattgtcggttcgaaatcacaaaagggcgttgctaaatacttcggcagccaagccgcctacatggcaaaatacgcaccaatcccagtgctggtagtgagataaagagtgcgaaaatcgccggagatattctgaggattagcctaacaacagaagaatatggcgattgcagcacgtttaaaaaagcgtgtgttcggtcgcggatagcaactgagtattttagattaagcggaggttggtgcaaccaaaaagcacgtttcaaaaagatgtcgataatttattttgtcggcatcttttttatatgctaagctgagaaaataaaagtttaagcggaggatagattgtggataatgaagtcgcagctttttgggatgattttgcagcggaatactatcagattcaacaagagtcacaggtgtcgattgtcactgacgttgtggcttttttacaggatcggcgattactgcctgttgagacagtggctgacttaggtggtggtagcggccgttatttgccacctctagtgcaaaacagtcaggcttatacgattatcgacatctcggcgcaaatgctccagtatgcacaacaagaagctaaacagcatgtaccagaccaacagattgcttatcaacagcagtctgtggctgactttatggcgcaaacgccacaaaaaagctatgatttaatttggatggcgttaaatccggcaatcgaagccaatcaagcattactgacgattagcgaaaagagccgtcagtggtgtgcattcttacggctcactaaaaacgaggacgacttgttcacaccgcttgaacgttattttgggattgaacagcaagatcccaacactacaccggaaatcatcccagctgtggaaaacgtgttaaaagatgcgggctaccaagttagtcaacaaatttttcaatatcaaacaagtgaagttttcgacaggccatttttggaggcctattacgaagaattaccaacggaccaactggcagcttatctagatcaagtatttgcaactcaaaaaacacggaccagtacaacaacgcttgaatatacgttgctgtattggcacgtgttttaagagttaaattcccatcgccaccagtcctgtcggaatattttcaactggtactgggtagaatggcaggccggtttggatggccgcaatcatcatgtgattaagatccatgatttgatcggcgctgattgttgctgatggtgcaagtgcagttgggataatgagtgctgttagttggcgattgttaatgcgtgaaagaataatctcaggatcaccaaggtttgaatcgccgtgatacgcactagcggcccgttctgctaatccgagcgctttttgtcggagttcatgacgcgcatttgtgagtaacttgtcgagtaagtcgtcatctgaaagagaatcaggggaagtttggatggcttgatccatccggtagtttggattaacgacgagttccttgaagagatttaagttgccgggtaatgtgaccacgtaaatcggtgctttttcaggcagcaagtcatcaagatagcggccaatcacgcggaaatagttagtttgatcgataagttgttcattttcttttacaacaaaactgtgggttggacttgagaagccttggacgacttcgcctttacgctctgtgccaatcccaatttcaatggttgttggggcgtctttaggtaaaggataatcccgaatgacattttgttgaatggatttcaaactaaaagtagtcttgttgagacagagaatggtcccgttcagactcagacttaattccgaactgagtggacgcaggtcgggttgatcagcaattagaaaatattcagtcgtgatcggataatgaaggggttggctgtagtgaccagcagctgtgatgtaaaacgcaactgactgtatatgtgctaattcttggggagcggtacttagtaagccctcaagttggttgagtaaggttttttcttcaggatagtcggtggttaactgttcacggatttgcttagaaaaactattgagcttaatcttgttcgcattaatggcttgtccgccagtctctaagttaatgaataacgagatgactggctgatttgaatcggcgagtaattgagttaaactttctggatataacatatcgacacctccgtttgattaacttcatcttatcatattgaacagctaactttgaagaaacatgcctttgtaaaaaataagccaacgagggacttttaatcaacttgatggaaacggtatgctaaaatggtaagtaggttaacaagggaggatttatggtatgggagataagacgaaagtggtaacacccacgaagattagcaaaagtattcggacccgtttttttgtactacaaatggttgtgattctaatccttggcgcgctcacaattaaacttgtgagcggctttagtccattattgacggattcagaaattctaaaaaatacaattttgacagcttttggggcaaccttagtcgcgcttgtagtgtggtacctatcgtataagattattgcaatgcgcattcggcgccaaatcatgaataaagagctagaggatagctacacttttagtttgaatcatgctgctagcagtcttagcttacatattgtgtactttatcagtatgttggtgattgtctggttgatgttgagtgctcaaaacgtgcgccagtcgctagatggcttacaccttttcaaaggtgatcaaccgattgtccggctggtcgataatcacagcatgaagcaaatcgagcaattctatcaagctgataagcaacaaaagatgacgtatcttggcagcaatcgagatgttgcttatttcaagattaataatgcaacgattagcttaccattagccaagattcaattctatggtcaagatgaagcgccgactggccatcagaaacaagtgattcaacattatcacttaaaagatgtgcaaaataagaaatacctcaaacctaatatttatattagtgaatcaggcttacctaaggtggccattacgaagatgtaccaacattatgagccacaaccaacggataagattcataaactcgacattaaataggataactaccacaggagggctggattaaacggctttcatttggtacagttagagatgaatatttttttaaataaaggagatcaagtcatgattgaagcagtaaacctcagagcaggaatgacgtttgaacaagacggcaagttaatcaaagttttagaagctaaccatcataaaccgggtaagggaaacacggttatgcgtgttaagttgcgtgacttacggactggctcaattgttgaaacaacaatgcgcccagaagttaaagttgaacaagcaatgattgatacaaaagatgttcaatacttatacacacaagataacgtggcattcttcatggatcttgaaacttacgaacaatatgaaattcaaacagctgctattgaagctgaattaaaatacttattagaaaacatgaactgcaagattcaattcttcggttcagaagtgatcggggttactttaccaactactgttaacttacgggtcgctgaaacacaaccttcgattaaaggcgcaacagtgactggttcaggtaaacctgcaacgatggaaactggtttagtcgttagtgtccctgatttcatcagcgctgacgaagtccttgaaatcaacacacaagaaggcacatacgttaaacgagcagcaaaataacaagcttaaggccgactagtcccatagtcggtacttcaaagtgaagccaagatggttttctttcgataaaagaaggaatcaccttggctttttatgtttgggtaaagggataaaaaaataacagagaagcaacttatgatggattgcttttctgttagttatcaaaaattatttgacgcaaatcgtggctttaacaaacaattctagtgaatataaacagttattacggtaacgagtccgaaaataacgccagggatgttagaaataataaccggccaatctttataggttttattccagccataggcggtccatagacacccattaattgttgcgactaagggctgtaaaggtgagacaggtgaccctgaaaaattagcgataatttgggggatgtatgaaacatacatcgtaatacaggtgattgttgcaaccttgctaagtaattttaaacgtttaactttcttagggtggacggcgttttcgccggtagggtattcgccagtatcaatgcgcataatagactccgtttcatgattgaattttattatatatggttgacttgaaaccgcttaaattctatagtgatagtatgcacgaagtgaaagagagtggaggttttacgaatggcaaagaaaataattcttgattgtgatccaggccatgatgatgctgttgcaatgatgttagcatacggcaatccagaaatcgatttgttggcagtgacaacggtggctgccaatcagacgttaacgaaagtgacgcgcaatgccctcgcagttgcgaccatgatcggcatgcacgatgtaccgattgctgctgggtgttcgcgaccattaattgaagaaattaaagtagcagctgatatccatggggagactggccttgacggggttgttcttccagaaccaacggtggcgcttgaaaaaagtcatgcagttgatttaatcattgatttaattatgacgcatccagctaatacaattacattagtgccaacaggtgcgttgaccaacatcgcaatggcggtacgcaaagaacctaagattgttgaacgcgttaaagaagtcgttctaatgggtggcggttatcacgaagcgaatgcgagtgcagtggccgaatttaacattaaatttgatccagaagcggccaagattgtattcaatgccggctgggatgtcacaatggttggtttggatttgacgcatcaagcgttagcgacaccagatattgttgaacaaattgaaggcattcatactgaaacgtctcagttcgtggttgatttgttagcctttttccgcgatatgtacaagaaggggcaaaatttcgatgcaccgcccgttcatgatccatgtgccgtggcttacgtgattgatccaagtgtgatgaccactaagaaagtgcccgttgatatcgaactcaatggaacattgacgcgtgggatgacggtcgccgattttagattcccaattccaacagactgtcacacatcagtcgctgtaaaactcgatcatcagaagttctggggattagtggaagacgcaattaagacgatcggctaaatagtcaaaatacttgagtagagaaggcgttgtacatgtatcacacattagaaagccgttatcaagggatgcaatataaccgcgtcggacattctgggttgaaattaccagcgatttcattagggttatggcataactttggtgaaaccgataagatggcgactcaaaaggaaacgatttttggcgcgttcgatatgggcatcactcatttcgatttggcgaataattaggggccaccagcgggcagcgccgaggaaaactttgggcggattttacatgataatctgcgtcgctatcgtgatgaaatgattatttcatcgaaggctggctattatatgtggcccggtccctatagtgagtggggctctaagaagaatattatcgctagctgtgatcagtcactaaaacgacttcagtcagattacgtcgatattttctatcatcaccgaccagatccagatacgccgattgaagaaacagctcgggccctagatttattggtgcaacaaggaaaggcgctatatattgggatttcgaattattcggcagaacaaaccaaagcgattacgaaggttttcagagcgctcgggacaccctttattattcatcaaccacgttataacatgctcgatcgatggattgaagatggactaacggatgtcttggcggatgaaggtatcggtgcaattacgtttagtccgttggcacagggattattgaccaatcgttatttaaacgggattccagctgattcgcgggcaagctcgtccagatagtcccttcctatcacctgaaaaggttgatcaaacaatcagtacggttcaagaattgaacaaaattgcgcaacaacgtgtgcaatcattggctgaaatggcgcttgcgtggaatttacaacagccgactgtagccagtgtgttagttggtgcttcgcgcttgagtcaattacaagacagtgtgcatgcactagataacttaacgtttacggccgaagaattagcggctattcaaaaaatattagcataattaaaacgacgactagctacgtaagctagtcgtcgtttttttttgtttttattcagctgtttcagttgcggctgcgtttgcttggattttaccaagaatggcgcgtgagaaaggtcccacgatgatcagttgtaatggtaatgcgacgataacattcatcaaccatgtgtgacgatagacactacctaagtggtcaggaataccaccttcgatgagaattccgaaaagtgacatacatgtgaccgtgccgagaatcattaaacatgaaattgtgagaatcatgactaatttattttctttgttcaatggtaagctaaatgcgatttttttagcaattgtaccgacaacgaatacatctagaataaatgcgacgatgaaacctggaattaaaccggtagacaaagcaccccatgatagactatcatgtaaaactaagttatagatactcattccaagtaccatgcagaaacacattaatgttgtaaaaataataccttcttttttattggttggcattttaaattccttctttctgaaaagttaacagatataaccgtatcacataaaaaatttcggcttaagcttttttttcagaaaatgagaagtttcttctttttcaatttcaatgggaatctcgccatcatgaacggcgtgaaaaatcgaaacgagcaataatgcgcagacaaaaatcaatgggaacccagcaatcacggaaacggcttgaatggtttggaaactaccgacaagtacaattccaagtgaaaatagaatgaaaatgatcacccaagccatccgattccaacgattaggttgttctccgattttcaattcaagactggtaaatgatgagacgatgaaggccgaagaagagatcgttgtcgccaggaaaatgaaacatgacagacagaaaattgctaacatgataattttgaacggtaaggtcgtgatgaccgccgcgatgacagcggcttgtccttgggtattcaatagatgaacaagatcgatttgaccggaacgttgtaagaagagcgcataaccgccaagtacagcgtaaaagctcatacaactaaatgcgccgtatgtcgccattcccaataaaacttggcgaatggttcggccgcgtgaaatccgagcgatgaataagcccatgacaggcatgtaagataaccaccatccccagtaaaagagggtttcgtgttgtgcgaacgcactgtgtgcaccagtctgatttaaacttaaacgcccgaagttaccaaagagatggaagatatcgcggccttcagcgccaattagcttgaatgtcggaccgattagtaagacgagtaataaaaagccaatggcagtatagatatgccaagcactgagcttcttaatgcctttatctaagccggcatataccgtgagggtgaatagcaccagtaagataatgaagagggcaagtttaagccagatggtatcattcaaaccggtcattgtgctcaagacttttgaaatcacgggaatttccattccgattgatgagccgatgccccccataatgccgaaaacaacggtaaagtcgattaatttgcgaattatttttttgtaaggttgtggtccttctaataggtcgattgcggcgcttaaacgttgtacccgtaagttcttaacatagagagcgtagccaattgcgacagtcgcggtggcaaaaatcatccatgccatgggtccccagtgaaattgcccacagacgttggcgtagcggtatgcttcagccgagaaaggtttagcgccaaatggtgggttctgtaagtattgcagtggatcagtggtactaagcattaagatgctagcgtcaatcccagttgcaaaaaccatactcccccattggaagtcgttatattctggcttttcatttggttggccgaggcggatatggccatagtgactacaccccaaccaaaataggaaaataaaattaatgatataaataccaatgtaaagccatttagaatgtgccgtcatcacatcaagtagttgtgaaatcgactgctgaagcgtgtcaccccccaacattaaaaatgcggagacaatcccgaacagtaacatcgtggggatgaagacgactttatcaacattcttgcgctttaaaataatattcctcctgaatttgttaaagtctaggttgctggatcaaacaaaaaaagcgcccatacaattggtcaactgaccacctgtacaagcgcgttattataacgtatacaaatgaagaaacagcctaacttgatttacttcttactaataggatagcacttatctcaaatttgttaagggtcgattttacggccgtgcggttgttaaccaattaagatagtcttgttcgcggttaatcgcgtgttctaaaataagataatgaccatagtgcgcatccaccgcagcttgttggctgaaaagggtttgacgccggtcgagtaggtgatctagtttggcttggtgtaagtttttttgttcggtgaacattgcgtctaaatgagcatcattttttgagtcgataaagtatagcttcaaaataaattcgtctttgctggcaataatttcgctggttggggagtatcgccactcgtcaaaaaaggcaatcccatctgcagtgattgaatactgcttcttttttaattttgttccggcgatcaattcgacgtgggtgatccgatcagcctgttcgagtcgcttgagttcaggatagatttggctgtgttgggcttgccagaactcaccgatatcatcttcaaagacgcgttttaaatcataaccggttttgggagactgatttaacagcccgagaattaagtattggagaatgtttttttgggccatctgaaagtgcccctttctgtgaaatcaacttagattaagtatagcacaggccagtgttgaaaaatggttactttttataagtctttttaattgcatttcataaatagttagcgtaggctatttcaatcggggaaaagtgcgttcaagcttaatcaacttttgagtattagtacggggaagcgaattagcgacgaagtcgatgatttgattcacggtgctaagcgcagaagtctgcgaattaaaagcacgttaaagaaaatgagtgcgtcaaaagtggttatcctgtgaggattagcctaattagccaaattagcggcgtaaccgattgtttggctaatgtagctaaccggaacaggatgcttttgaaagcacggtaaaaaaggagttttatcaatggcaaaaaaatcaaaagtggcaaaattagcaaaacaacgcgcattagtagcgaaatacgctgacttgcgcgcagaattaaaagcaaagggcgattacttagccctttctcaattacccaaggattctagcccagtgcgattgcggaaccgcgatgtaatcgatggtcgaccaagaagtttcatgcggcaatttggtatgagccgcatcaactttcgcgaattagcccataaaggccaaatcccaggcgtcaaaaaagcaagctggtaaaaaaatgagtgcgttaattcgcggttagcctttgagcacttgcctaatcagaaggataagcgccaagggcgattgtctggttgatgtagcaaggcgcagaaggttgcgaattaaaagcacgttaaagaaatagaagcgcgtttgaaacggtttgacttcgagcactagcctaaatctgtaaatgagcgacgtagtcgattgtttacggattggagctaagcacagaagtcagtttcaaaaagcgcgttaaagctagaaacccacaaaagaagaggtcgtcccacggcctcttttcttgtggggattgaatacgaccttaccggtggtcttgaatttagcgttagtgggttacgaagatgtgatcggcacggccagcgggttgtttagttttggctactacctcgcaatcagcgccttaacgtacggcatgagtctattgcatacgggatcgaatactcgattaccgttatacatgatcatgattgtcggcgtgatggctctgagttatggattcgggattcgttcaaaagcagtttaaatgtaaaaagcgcgcagacaatcagttgtctgcgcgctttttatttaagcaagttgttgttgcaaaccagcgaggaaaatatcgaggcctagcatgaatttttccagtgagcgttgttgttggtgccgatgatgttcaaaagtttttaagaaagcattgtaatgattgtcagtcgcaatctgctgcattttaagcggtaactgtgcaagataagtgtctttatgttgtgagacgcgatgtttcatctcaagctcaccggtgatgtcagtgaagagaccggacatgaagtgatcgatggattcaatcgctaggcttgcttgttctggcgtgaaaccggcatccaaaaggatttgaattaagtggttgataagacctaggcgggccttagttgcagggacggtccgcatcatcaactcagcggcatagggctgtgctatgtaagtggtgtaaatggcgctaaaaatttggcgaatttggtctgtccattctaaggttgtgttacatggctcaatctcaatttgttgaataatgttatcagccatcgcctgtaggagggcttgtttgttttcgaaatgccagtaaaatgtggccgccccgatgtctaattgattggcaattttacgaattgaaagggcatcgacggtcccggatgcttgtaaaatttcaaacgcggcagtgatgatttgctcggcagagattgactgttttaccatattaatgaagctccttcactttttatgaaaagatgattgtaattcgttttaaaatttgataaagtagtaactcgaacactgttcgattatactgtacaggatttgtacaggagattcaactacagaaaaagagggatgctcatgtcgatacttaaacagcacttaaagccttattggggcgtgtttagtctttccattttagcgacggttatttctgttgcgtcttcactatggcaaccaaaactattacaagatgttttggaagggattatgaaaggcgatcaagataaggtacgtcaaattggaatttatttgattgtaattgccgtggttggtttaattgcgggcgtggtcaacaccattacgtcggcgatgacggcgcagggaatgactgccgatatgcgggaaactactttccggaagatacagactttctcatttgccaatattgaaaaattctcagttgggaatttatccgtgcgtttgaccaatgatatgacccaggttcaaaacgtcattatgatgacgctccaaacgatttttagaatcccgattttatttgtcggcagtttcatccttgcgatgaattcgattccgagtttatggtggattatcgtgctcttagtgatcgcggtcttcatcattacattcttatcaatgggttcgatggggaaacacttcggtgccatccaaaatttaatcgataagattaataacctcgctaaagaaaatttaatgggcacgcggattgtgaagtcttttgtccaagaagataacgaaatcagtcgcttctcaaaaacaagcaatcaattagaacaccatacgacaatcgtcgggatgcttttttctgtgatgattccagcgttcatgttggtggcgaacttagcggttgtcgcatcaatctatttcgttgggaacttagtcgatacggatccagaagcgattgcggcgattgcctcatttatgaattacttaatgcaaatcatgatgtcgatcatcatgggcggcatgatgatgatgatggcatctcgtggggcagtttcgttgaagcgactccaagaaattctttcaacagagcctgatatcgtttatccagatgtccctgatcaaaacttagcggggacgttggaattcgatcacgtcagcttccgttatccagaagacgatcgtaacacgttaacagatattaatttcaaaattaacgctggtgaaatgattgggattgtcggcgcaactggggccggtaagtcaacgatggcgcaattgattccgcgcttgttcgatccgactgaagggcagattaaaattggcggcgtgccaatcaaagatttaaacgaacataatttacacagcgccgtttcatttgtcctccaaaaagcgattttattctccggcacaatcgcacaaaacttgaagcacgggaaaaaagatgcggatgacgccgatatggaccgcgcaacggggattgcccaagccaaagagttcatcgaaaagcttgctgatcaatatgatgcaaccgtcgaagaacgcagtgcgaacttctctggtggtcaaaaacaacggctctcaatttcacggggggtaatcgggcaaccgaagattctgattttggatgatagtactagtgccttagatgcccggtctgaaaaattagttaaagaggcgttagaccgtgaattagctggcacaacaacactaattatcgcgcaaaagatttcatctgtggtcaacgcggatcggattttagtgttagatgaaggtcgtttagtcggtgttggtaaccatcatgaattacttgaaaccagtgatgtctatcgagaaatctttgaaacgcaaaaaggaaagcgaggataaccaatgcgagaatttaaccgagcaatgaagttctttttccattatctaaagcggtataaaccttcttttgcaatcatcctcgtgatgactgtgattgcgacttatcttcaggtgaaagcacccgaatatatcggggacgcgctcaatgagttagtcaaatatgcaacgaaatttcaaattttaaaagcccaacatttgccaaccagtggggcatctaaagacgccttcgtagaggtgattgtatcgttgattttattctacgtctttagttcagcagcgacgttggtatcaggcgcggttttctcacgcgtcaacgcgttatcaaccaaccggatgcggattgggttattcaataagctccaaaaaatgcagattaaatatttcgaccgtcattcagatggcgatattctcagccgctttacgagtgacttagataatatttacaatgcgatgaatcaagtgttgagccaacttgtatcaggcacggcgctcttaattggtttattgattatgatgtttagaaaagatgtgcagctcgcttgggtgacaattgcttccgtcccaatttcattcatccttgcttggatcatcattaataaagcgcaaaaatacgttaatgtgcaacaagatgaagtcgggaaactcaatggctacattaacgaaaaaatcacgggccaaaaagtgattattactaacagccttcaagaagaaacgattgatggcttcattgaacataatgaaaatgtccgcaaggcgactttaaaaggtcagatttattctgggatgatctttccgttgatgcaagggatgtcgttggtgaataccgcaattgtgatttcctatggtagctggttagcggtgaacggtgacattaaaaagtcgatcgctttgggcttagttgtaacattcgttcaatattcacaacaattctataaccagatcgcacaactttcatcgagttacagcatgattcaattggcaattaccggtgcccgccgagtgaatgaagtgtttgatgaagacgatgaagtgcgtccaaccgacggtgtgcaatttgagggcattgaacgctccgtgaccatggaacatgtcgactttagctatttaccaggtaagcaaattttgcatgatgtgaatatcgaagtggataagggccaaatgattgcgttggttggtccaactggttctgggaagacaaccgtcatgaacttgatgaatcggttctatgatgttgatcaaggcgcagtcaagattgatgacattgatatccgtgaaatggatttggatgcattacgctcgcacgtcggcatcgtgttgcaagaatccgtgcttttctcaggaacgattcgcgacaacattgtcttcgggaaacccgatgcaacagatgaagaagtggtggcagctgcccagcaagcccatattcatgacttcattatgacgttagatgatggttatcaaacggctgtcagtgaagaagataacatcttcagtaccggtcagaaacaattgatcagtatcgctcggacgattatcaccggtccagcgctcttaattttggatgaagcgacaagtaacgtcgatacggtgactgaaagtcatatccaaaaagcgatggacaacgtcatccaaggccgaaccagtttcgtgattgcccatcgtttaaagacgattctcaatgcggatcgcattatcgtcctcaaagacggtcgcatcatcgaagaaggcagtcaccaagaattactagacgaaaaaggcttctacgccgaactgtacaacaatcagtttgtatttgaatagagtgcgacagcgagcgtttatattttgaggactagcctagtcagtcaaatgaccaatttattggccatttaattcaaccggcaacttgcccagtgcgctgagcgtcaattgatgcgttgcccgcgaaatggcggtatagaggcggttgtggccgacagttggctcggtataataattgttagtcagatcgtacaacaaaacgttatcaaattctaaccctttagccagcgtcagcggtaaagtgaaggcgccggtttcggggaggttcgtcgtttctgtggataagtggtggacatttttgaggccagtcaaccgctcgtcaaaatcaccagcaggtgtgatgatggctaaggtctggtcagttggtagttggtcaatctgagcttggatttgggtgaggtagtcgttaaaatcagtcgcacaaatcgtcgttggccgcttgcctgctggttgaacggcatggacatctgttaaatcggtgaatagctgactaaataacgtcgtgattgcaccggatgagcggtaacttgtgcgcagtgccgcagtttgtagttgtggaaaaatggtgggtaattgttcgaattgtactttatgcggggtaatactttgatgctgatcactgaaaaccgtgaactgtgctttggggaaaagttgtttaaaaagagataacgtgcttgcgtgatagtcctgcacttcatcgataaagacctgcttaacgtttgggaagacgtgatgcgttaaataagcataaatctgagctgcaataacagcatcaatcggtgtttgacgggcaattatttgatcaaaagcaagccattgataaccgcttagctgatcagctaagtcttggtaatcatgacgaatcattttgcgtgctagcggtgctagtggttcatcttcgcgaattaagcggtcgaataagcgctgttgctcggtttcagtgaggctttcaagtcgagttaaagcatctgctgattgggcttcatttgtgatgctttcctgtagacaacttgtgagttgttgctgagttgcttgtattcgtttatcaagcggggtatccaccggtgtttttaagaagaattggtagcttgttgcggcatcaatcgtcagcggtaaaccagggcttaaagattggaaatcgctcgcctgcaacgttaattgtgtgatggtcaaagtagctggttgatcagcgatggggagtgcggctagatcagaaggtaacaattgcgccaatagttgttgtagggttaagttgactggtgtttgttcacctaagtctggtaaaacttgggcgatatagtcttgaaataggcgatgcgttgaaaaatgaccgatgttttaccactgcccgcaatcccatcgatgagtaaatggtcagtcgtttgttgccgaataatcgcgttttgttccttttgaatcgtcgcggtaatggcgctcatttgcgttgttttggcttcttttaaagtggctaataacaagggatcttcgatggcaatctgcgtatcaaagaaatcgattagctgatcagcttgaatttggaactggcgccgtcggtcgagattgaccgcaatggcgcgaccgttagcttgataactggtggggccgaatgtttgctggtaataaacatcggcgataggtgaacgccaatcgtaaatcacaggatcgccggcttggtttgtgaagctagctgaaccaaggtaaaaatcttcggcgtctatttcctcaggaaaagtcagcgtgatttttgcaaagtagggttgctctaacagccgtaaggtctcatcatgacgtgcaacgagcgaatcggttttcaggttgagcatatcgatttccttgttgatactttctaaagcagcgaatgtatcaagattatcagcgtatgaatcgaaattgagtttggcttcaccggtgatctgcgctttgatggtgttgccgtttttctggttttgcgattgggcatcattgatggccgtcaaagtggtggttaattgttgataaacagtggatagatgcgcttgttcttgattgaaatcagtcgtcattcaaacagcccctttacaaagttgttcccctagtttagcaagcacgttcaaaaaaggagtgcgtcatcaacgggtagcttctgagcatttgcctaacttagcgaattggcgctgcaagcaccgctttgctaagtgtagcaaagcacaggaagctgttgatgaaagcacgttcaaaaaaggagcactgactgataagtcggtgctcctttttgcgttagtctgcttttatgatggtttcaattagatcaaaaaatccagctgcatcaacgtcgtagacgagtttagccggacgtccgtttttagttaagaacgtgcgcccgccggcaattccgtttggaatgacatcacatacaatggcttttgttttaacgattgttggatcaagaaggtaacaagttgttaaaacgtcccataaataataagttgaattagttttgaaatggaccagttgaggaacaaaggcgtaacaggtgccgataaagtccatcatggcattggcacgtttactagcccaacgttggcgaatcgccggcgttaagggaacattattcgtactttcgagcccgactaattcaatagggatttgtgtatcgaagacagttttcactgcttcgggatcccagaaggcattccattcagcagtaccatcagaatcgggttcagcaacgttgccttgttcaagaaaagaaccgcccatccaaagaagtttagcgattttatattcgatgcttggattgatggcgagtgcgcgtgccaagtcagttaatgggccggtaaagagcaatgtgacgggttcggttgcttgattgagtttagtgattagatcgagatgtgcggcttcaggactcagaggcgtttgaacggtgccacgttcattgagcacgggaagtgcatcgactgagtaagcgtcagttcgccattcttttggaaaaggatggactgcgcgtgagtcagaagcggccacagctaaccgcgctgattgatctgaaaacgtatcaatgattttacgactcgcgctaacggctggttcgacatatgaatcagcgccaattacgccgacgccaagtagtttgattgtcggcatttgtaggagcagagttaatgaaatcaaatcatcaacaccgccatcgtgattaaaatagacttgtgtttgcatggttcgcctcctgattgttcgttagttatcaattaatattagcattatctatatttcttagcaacaaatacaatataaacgaacaatattttataaaatgaaatcaatgtattgattttatgtcgataacgtgtttataataaattatcaaatttattgacggaggcttatttcatgaaaaaaagtttggtcgtacttttctcgacagtccttgtattaggtggcgtgttagccgggtgcgggagtcaaaagacagcatcaaagaaagcaacgcacacagccgctttagtcactgatggtggtgggattgatgataaatcttttaaccaatctgcctgggaaggtttggaaaaatggggtgctagtcatgatcttaaaaaaggggtcaatggttacaattacgcacaatcgagttctgatgcggactttttcccgaacattaataagttaatcaaggcaaaataccaaacgatttttgcgattggctataagttagataacgcggtcagccaatctgcaaagaataatccaaatgttaactttgcaatcatcgattcaaacgttaagaatcggaaaaacgtcgcgtccgtcaattttaaaacagaacaatcatcattcctagccggggttgccgctgcgaaaaccactaagacgaataaagtcggctttgtcggtggaattgatagtgccgtcgtgaaaacattcgaagctggttttaaacaaggggtgaaagccgttaacccagcaatcaccgttgatgtgaaatatgctggttcatttacgaaagccgatgtcggccaatcattggcaaccgcgatgtacaacaacggcgcggatgttatttatcacgctgctggtggcactggcgctggcgtctttaccgctgctaagaacatttctaagggtggtcaaaaagtctgggtgattggtgttgatcaagatcaaaaagccgatgggaaatatgatggtggcaacgtcacattagcatctgccgttaaacaagttggcacagcagtggaagatcttgctaaccaagctaagaatgataaattccctggtggcaaaaccgtcacatatgatttgaaagacaaaggcgttgccttagtgaacgacaatgcttcccctgaaacatggcaagcagtcaaagaatatcaacaaaaaattgaatcaggcaccattaaagttgctgcagaataacgactattgaatgctaaaggatggcagcagttatcagccatcctttttgtatgcttaatgaatggagcgtaaaaatggcaaaaactgtgatagaaatgcagcacattacaaaacggttcggcgcctttaccgccaatgatgatatttcattaaccttgcaacagggtgaaatccttgccttgcttggtgaaaatggtgcggggaaatcaaccttgatgggtgttttgaccggacaattaaagccgactgcggggcaattactggtgaacggacaagcagtgaccttaaatggccctcgacatgcaaaagccctcgggattgggatggtacaccaacatttcatgttaattccggcttttacggtcttagaaaacattatcctgggtgacgaaccaactaaacagggccggattgactatgcaacggcgcggcaaaaggtcacggctttagtcgataaataccaactggcgctcgaccttgatcgaaaaatcgctgatatttcggtcgggatgcaacagcgggttgagattatcaaggcgctttaccgagaagcaacgacattgatttttgatgaaccgactgcagctttgacaccgaatgaaattcaagccttgcttgccatttttgagaagttaaaggcggaagggaagtcgttgatttttatcacgcataaactaaaggaaattaaacaagttgctgatcggtgcgtcgtgattcgtgccggacgtgtgattgatacggtactagtcgcacaaacggatccgacaaaattagcggaaatgatggttggccgtccgcaacaagcccccacaccgaaaatggctaatcaaggcgctgtgatgctatcggtggaacatgtcgctgctcgtgttgctaaacgcactgttctagatgatctgggattgaccgtgcatgcgggagaaattgttggaattgctgggattgatggcaacgggcagagtgagttaattcaggttttaaccggacaattaaaaccgcagtctggaaaaattgaattaggaggtcagtcattattgaaacggacaccacgccaaattagtgaacaaggcttagggtgcattccagaagatcgccagaatatcggtttgattttgccactgtcgattgctgaaaatttagcgctgaaggattattaccatcaaccgtatagtcatctaggctggcttaattatcgggtgatcaatcaaacggcgcagaaactgattaaacgattcgacattcggacgcaatctgaacaaacgcttgccggagaactttcaggtggtaatcagcaaaaagtggtggttgcgcgcgaaatcgccaaacaaccaaaagtcttgattgctgccaatccgacccgcggtgttgatgtaggtgcgattgaatacattcatcagagcttgattgaacaacggaaccaaggctgtgggattttacttgttagttttgaattagatgaaattttaaagttagctgaccgagtacttgtaatgcacgccggtcaaattgttggtgaagttgatccacaaaccacaacgagtcagacgctcggattattaatggccgggcaacaaccagtgggagggcgagacgaatgaataaacaacaatcttcaggattaatcattgcaatcctatccgttgtggcgggactgttagtgggcggagttgtgatgttggtttttggatattcgcctattcaaaattacagtaacctctttaatggcgcattcggagatatctattcgattggcgagacattacgcaatgcgactccgttaattttgacagcccttggcttttcaattgcgagcaaagccggctttttcaatattggtgggtcgggtcagctattagtgggctggtttggcgcgattgtctttgcactccactttaaaaatttaccggggattctcttgattcttggcgcgattttagcggggatgctgctcggtggcttttggtcttggttggccggttttttacgggcatactttgggaccagtgaagtgatcacaaccatcatgttgaactacatcgcattgtatttcgtcaattttgcgattaaacgttggttggcgccaaaaggcagcgactcatcggccaacattgtccctaaagcaagcttgcggaccccttttttggaacagattaccaatcactcaacgtttcactggggctttttcatcgcgttagtcttggtgattgtgatgtggtggtatttgaaacggtcgaagactggatttgaaattaaggcagttggattgaacgaacaagctgcacgttacgcggggatgaatacgaaacaaacgattatgtgggcaatgctattatctggactactagctgggttagcgggggctgtcgatggtctagggaattatcaaaatatttccgtttcaaatgccttaccagatatcggctttaatggaatggcggtcgcgttattagcgaatgggcatccaatcgggattatctttgcggcgattttattctctgctttacagattggtggcttaagcatttccgtctactcaacaactccgacagaaatcgtcaatatcgtgattgcatcgattatcttcttcgtgggtgtgcgcttcttatttgaacaattactcaatcaccgcttactgaaaaaacacgcgttgatgaaagagaggcttgaaaaataatgacaatcacaatgattttaatgacgatttgtgcgaccacgttagtttacgcggcgccattgatttttacagccttgggtggtgctttttcagagcatagcggtgtgattaatgttggtttagaagggattatgattgttggggctttcagcagtgccgtctttacccttcaatttagtacggtttttggcggattgacgccgtggattgccttattggttggtggactgtttggtgcactgttctccttattacatgctttagcgaccgtaacattgcgcgctaatcacattattagtgggacggtgttaaacctattggcgcctgcattgtgtgtcttcttaacccgtgtgctgtatagcggtaaggggcaaacgccggtgattaatcaaagcatcggtaacttcacattccccggcttggcccaaattccagtgattggccccattttatttacgaagacgtcgttagtggcttacgctgcggttttggtcggcattatcagttggtatgtgctgtataaaacgcggtttgggctgcgcttgcggtcagtcggtgaaaatccagcggcagccgatacactgggcatcaatgtgagtcgttaccggtatatcggggtcatgttgtctggtttgttaggcggcattggtggcgcggtgatggcgcagtcgattacgttaaacttcagcgcagcgacgatttcaggtcagggcttcatggcattggcggcgatgatttttggtaagtggcatccaattggcgcgacaggtgcatcgattttcttcggactcgcacaaagtttgccgattatcggcggctacatcccaatactggccggtgtgaatagtgtctggttccagattgcaccatacgcgattacgattattattctggtgattttcttgggcaaggccgtcgcaccagcagcggatggcgaaaattatattaagagtcattaaaagatcattcaaaaaggcgaacacaattgcttgtgttcgcctttttaggctaatcctcagcggataaccatttgcagtcgcacgctattctaagtagtcctcttttaattgtttgatttcttctggtttgagggccattgcctttgataggtagttttcgatgttgccgtattcttgattaatcgtgtcgcggacaagttctagattagcctgtgtaatgctcttagcgttcattgaagcgacctggctatcgttacttgaaattcgggttggggttgctgagctgagtcctaggacctcatttgagaggacatagtcggcaacgattgttttccagtcgacgccgagagcacttagaattaaaaaagttgcgacaccagtgcgatctttaccggctgagcaatggtaaaggactgcaccgtttgtatcgtgattatttaatagtacggtaaataaatcacgataagttgcttgagcatgggagtcggtgaccaattgttggtacatccggtccatacttgatcgttcgggagtagcagcttcttttttaccaaaaagccgcattaggccttttttggctggctttttaggggtatcggcttggtcagtgaatggaaataccgaaagacgatggtaggttagttggttgtcatcaaatgggtcgggggcgaccttgatttcatgacgtgaacggaaatcgacatcgtaagcaacaccgtaatttaagagatcctcaatatcagttgcggttagcgcgttcaaactacctgaacgtaataatttgtgccatttaacggacttgccatcaaccgtttggtaaccgcctaattcgcgtaggttataacttcgtgttaaatctagaacccgttgttgttcttgcatgccaatccatcctttataatcagttatttctattgtataacgaagctgggtggtgtgcacccttattttaaatgttcgtgattcattcgtacacgatattgatgaaaatgaattttcaataagagtttattgacgtttgcagaaaaatctgctaatattttatcaaattttaaactggttatcgattaaagataatacgaacaatcgatgggtcggcggttaatttagttcacaaattggaggaagattatgtctgcatgggaatcaaagtttacaaaaaaagggtttacgttcgatgatgttttattaatacctgcggagagtcatgtactccccaacgaagtcgatttaggggtgcaacttgcaaagaatatcaagttaaacacaccaattatgagtgctagcatggataccgttacggaagcacccatggcaatcgctatggcgcgtcaaggtggtttaggcgtgattcataagaatatgagtattgaacgtcaagcagatgaagtcttgaaggttaaacgttcagaaaatggcgttattattgatccattttatttaacagcggataaacccgttagtgctgctgaagatttgatgcgtaaatatcgtattagtggtgtcccaatcgtttcaaatctcgatgatctaaaattagtcggcattattacgaaccgtgatttacgttttatctctgatttctctgctgaaatcggaaccgtgatgacgcacgaagcacttgtaaccgcacctgtcggcacttctttagaagaagctgaacaaatcctccaacaaaacagaattgaaaagttacctttagttggtgatgacggtcgcttagccggattaatcacaattaaggatattgaaaaagtgcaagaattcccgaatgcggctaaggatcaatatggtcgcttattagttgctgccgctgttggcgtcacaagcgatacttttgaacgggctgcagccttattgaaagcaggggctgatgcgatcattatcgatactgcgcatggtcattcagctggtgtgttacgtaagattagtgaaattcgcgaacgcttccctgaagcaaccttgattgctgggaatgtcgcaactgcagaaggcacaaaagccttgtatgatgctggggttgatgtcgttaaagtggggattggccctggttcaatctgtacaactcggattgtggctggtgtcggtgtaccacaattaacagccatctacgatgctgccagtgttgcccgcgaatatggcaaaaccatcattgctgatggtgggattaaatattctggggacatcgttaaagctcttgcagccggtggaaacgttgtgatgcttggtagtatgttagctgggactgacgaagcacctggcgaatttgaaatctatcaaggacgtcgtttcaaaacataccgtgggatgggcagcttggctgctatgtcgcatggttcatcagaccgttacttccaaagtggtgtgaatgaagccaacaagttagtcccagaaggcatcgaaggtcgtgtggctgccaaaggcgcactcggcgatgtaatttaccaattacttggtggcttacgttcagggatgggctacgttggtgctgctaatttacaggacctacaagataatgcacaatttgtccaaatctcaaatgctggtttgacagaatcacatccacatgatgtgcaaattaccaaagaagcacctaactattcagcacgttaattcaaatcatttctatcagggtttaagtcgagcgttttgcacgacttaaatcctttttttgtggttaaatgatggggaggatttaaagaattctttaaccctaagtagaagatagtttgttacaatgaaagcgaatcatgcaaaatgatgttaaattaaacgaggtaacgattatgaaaattctaattgtagacgatgataaagaaattgttgaattattaagtatttatgttaaaaacgaaggttacgaacccattcaagccttcacgggtaaagaagccctgactaaaattgccacgaatcccgatattgatttgatgatcttggatattatgatgccgaatatgagtggtatcgaagtcattaaggcggtccgtaaggattcacaagtgcccattattgtggtgtctgccaagacaactgatatggacaagattcaaggcctcctaaccggtgcagatgactacgtttcaaaaccattcaatccattagaagtgatggcgcgggtgaagtcattgttacggcggagccaacaacaagtggccaacgaagtgccggatgtcttagaagttggtccgcttatcattaagcgcgactcacatgaagtgacgacgattaataacaagcaaatccaactcaccgcacttgaatttgggattttatacttacttgccagtcaccccaaccgggtcttttcagcggacgatatttttgaacgggtctggaaacaagaaagtatcgtctctgccaagacggtcatggtccatgtaagtcatttgcgcgacaaaattgaagaagcaaccgatggtgaaaaagtgattgaaaccgtctggggtgttgggtataaggtagaagtttaatggctgactatcaaggagaaaagaacctgcaaaaagtggcactaaccgctaaggaaaagagcgaactctttgccgagggtatcatcacggttattttgttattactattaaatttatcaatcatggtgctgttacaacaggcgattgtgaataatccgcaactaagcggcggcgtatggatgattaaaaacgccattacaattggtccgaatgaatggcatatttggagttggcaaaattggtttgtcatcttgatgggggttgccgatgtgttagtcgtctattggcggcttattcggcgttaccatcaaatgcagatgtggcacgtgattggtgagttgcattacattgccgatggtcatttggaccaccggattaatttgcgtgtcaaccgtgatttgcaacgcgtgatcgatagtgtgaacacgctggttgatagtactgtgcgttcaatggaagaagaacgcaagattgaaaagagtaaggacgaattgattaccaatgtcagtcatgatttgcggacgccgctgacttcaatcatcggatatcttggtttaattgaagataatcagtatcaaaccaaggaagaactaaccaaatatacgcatactgctttcgtgaaggcgcaacaaatgaaggttttagtcgaggatttatttgaatacacgaaggtgcggcaaacatcgactcccattaccaagacaacgtttgatatggagcagatgttagatcaattagcggccagttttgagttagaagcgaataagaaggggatgcagattaatgtaacttgtaatcctgcaccactgatgatggaagccgatactgaaaagcttggtcgagtcttcaataatttaattgctaatgctttgaaatatggcaagggtggcaaacaaattacgttggcggctgaaaaaatcggtcaagaggcgattattaaagtgtcaaatgatggtcaacaaattccaagtgattcattgaaccaactctttgaccgcttttatcgcgttgaagcatcgcgttcacaagaaacaggtggcactggacttgggttagcaattacccaaagtattgtcgcgttacatggcggttatatttatgctgattcgacgccagaattaaccagttttgtgatacacttacctttgaagttaggtcggcggattgatcctcaaactgctggcgcaaaatcagttaaggagtaatgttgtgtttaaaaaattagtacaatatgtaatggtcggcctattggcaattgcacccgttggcggtcttttgagtgcccagactaccaaagtcgcagcggcaagtacgccggtgagtttgccgaccgcccctcaaatcgatacgagtgcagcaattgcgctcgacccagcaactggacaagtcttatacgaacaaaatgcggatcaggcgttgccaatcgcttcgatgacgaagatgattacagcctacatcgtgttagcgcaaattaagcaaggtaagttaacgtgggaacaaacggtgaagcccgatgacctcatttatcaattgagtcaaaataaggatttaacgaatgtgcctctacaagcggacggacaatataccgtcaaggcacttttccaagccatgatggtcgcttcggcgaatgatgcagccatgatgctcgccaaccaagtggccggttcacaaaaggattttgtcgatttaatgcggcaaaaagtggcggattggggcattcaagacgcacaactttattcagtgtccggcttgaacaatgaattcctcggcgctgaagtttatccaggcagtccggctgatgctgaaaatgaaatgagtgcggcagatgtcgcactcgtagcgcaaaagttgttggctgattatcctgaaattctcgaaacaaccaagcaagcgcattttacatttggcgcccaaacaagtgatgaaacggccatgtcaacgtggaacttaatgttacctggcgaaaataatgcaccgcaagactacgtggtcgatggtttaaaaaccgggacaacggacaaagcgggcgattgttttaccggaactgcgacgaaagatgggcaacggattctaacagtggtgatgcatgccaatggtgaagatactggccggcggttcattgaaactaacaagttaatgcaatatgtcttcgatggttgggaacaaaaacaattggcacaagccaatcagagtctcgcaccttataagacagcgacggttaaatatggtcgccaaaagacagtgcaattgattacgaacaaagctatttcaatgtgggtgccaaaaggaaccacagcagccaacattgactggcattaccaagcagtcaaaggtggtgcaaaacgccaattggaagcacctattaaaaagaatgtgcaaattggtcaagtgacaccacaattgaacggtgtcactacgcggtatatcggacaagcgccacaatcacaattacgcactaaaacagcggaccccaaagccaatttatttgttttaatcggtgaagggatcaaagaatttttcacgaacctattttagttggaattgaaacgcgacacttaacggtggcgcgtttttttatggctacgattataagccgtttcaagcgcagcatgattaaatcgtgctataattaaaaccattcacaaggattttgaggaggacgaaaatggctttaacattagatgcatgtacgttaattctaaaagagcatcatttattgaaaagtgtggcgcttaatggtgacccgactttaaatatgaccggaatcgcgtatgattcacggcaggtaactgaggacacgctctttttctgtaaagggaattttcgtcccgtctatttaacaaatgcaaaagaattaggggccgtaacatatgttgccgaacaagcgattgttgaaggcaacgggatgaacgccttaatcgtcacgaacgtccaaaaagcgatggcggttttatcagcggctttttatgattacccacaagatgatttatttatcgtggcttacactgggaccaaaggcaagacaactgcggcctactttactcaatcgattttacaagcgacgacccgtcaaaaaacagcattattttcaacaattgatcgtgtcttagggcctaaaccagaggatcgcttcaaatcgaatttaacgacaccagaaagtttggatttattccgcgacatgcgcaaagcagttgaaaacgggatgacgcacttagtgatggaagtttcgtcacaggcgtataagaaaaaccgagtgtacggcttaacgttcgatgttggcttcttcctaaacatttcgcctgatcacgtcggaccaaatgaacatcctaattttgaagattatttacactgcaaattacaattattggtcaactcacgatactgtgtgattaacgcgcaaacgcaatattttgcggatgtgtatgctgcagcaactacgacgactgctccggaatcaatttacttatttgccgaaacggattatcaacctacaattccggtggcagttgatttccgctttgaaaatctagaaacgggcttagcagaaagtcggtttaaagttaccgcggcttctgaacgagccattcagcttggtgtttctggtgattaccaattgcgtttaattggggatttcaatgaaagtaacgcgacagctgcagtgattggtgccggtttggcaggggcggatttaatcgcagctcaacaagggattcgcgacttgcagattccaggacggatggaaaccttagccgttccaggacatggtcaagtatatgttgattacgcgcataattatgccagcatgaaggcgctcttgagtttcttgcaaaaggaatacaatcaaccacgcctactagttgttgtcggtagtcctggcgataaaggtgtttctagacgtgctgggtttgcgcaagtccttaatgaatatgcagatcgggccattttgacgactgatgatccaggatttgaagatccagcagccattgccgctgaaattttggccgggattgaccaggataaggtgacaaccaccatcgaaattgatcgtccaacagcgattgaacaggcgattacggaaagtaaaccgggcgaaattgttgtcttagcggctaaaggggccgatgcttatcagaaagtacgcggggtcgatacaccatatccaactgatatggtgattgccaagcaagtggctgctaagttaagctaatcagcgtgtttcttaaagatttttaaatcagatgtggatttaattgctattctgaggtgtgtctcatagaataaagatgaatcaataggagttggaggggttattatgaaaaagatggttacagttagtacagttttggtatcaggactactattattaggggcctgtggtcaaagtagtacggcaaatcaagatgctgatgccaagcaaagttcaaccacggctagtctcaaagcacgtgaaagtagcgttgcaaaacgcgaaagtgaactttcaagtagtgcaagccaattaaaagcgagctccaaagcggcgatggcatcttcaactgaagtagagtccccacaagcaagttcatcaactgcaagtgttgctgaatcatcatccactgctacaacggcaagtagcagtagtcaatctgcgagccaatctagcagcagtgcaacaacaacgactaccacgacaccacaacaaacaactgccgtagatggcaaccaagcgattaagttggtggttcaacaagttggctcacaatttggtcaaaccgcatcgtatttgaataatggtttaatcacacgcggtggacaacaaggctatctcattaatatttacgtaccaaacgaagatcaaccacgggcaggttattttgttgtccaagcaacaggtgcagtggaacaaatctggtaattaaagagtgtggcgtaagtcgggatactccgaggattaacacagagcgtgaataattgtagtaattgtttgcgactcagggttaaccggaggagaatgacttacagaacacgtttaaagttcaacaattcaaaaaaggggttagggcaaaagcaatctttgtcccaatccctttttaagtgttttcagaaaaatgattgacaattagtgagactcgtgtaaaatatttttagtaaaacgtaataattacgatttagaaaagaggagaaaaagatgcgtaaaaaaggtttggaaatcatggcgggaatcttactgctaatgctattagtggctggttgtggtcagagtacgaaaaaggcgagtgggattcaagttgtatcgtcactcgatttttatggtgaggccgcacaagcggttttaggtaatcaaggtcacgtgacgtcgattatcaatagtcccagtttagatccacattcatacgaagcaacaaccaatgatgctaaactcgtggctaaagcggatattgtgattcaaaatgggcttggttacgacagctggttaaacaaagtcgttaagagtgcccaaccagatgaccaaactgtgttgacagtcagtcaattaatgaaacaatctaatggcgctaacgaacatttatggtatgatttaaagacgatgccaacattgaccaagcgattagtgactgaatttagcaagcgcgatccgaaacataaggcaacgtatcagcaaaatggtgcggtgtatcttaaaaagttagcttcgttagacgcacaactccaacaactaaaggcgcaggccaaaggaaaacaagtggctgttagtgaacccgtttttgactatgcattggctgaaatgggttacaaagtcgctaaccaacactttgccaaagcaattgaagatgggaccgatccatcaccaaaagatattacaacgatgcgggatttaattaaaacccatcagattgcctttttagtgattaataagcaagaagaaagtcccattattaaacaaatgcacgaactagcggataaagaaggggtgccagttgtacaagtaactgaaacactacccgctaaaaaaacatatttaacatggatgcaacagcaatttgatgcagttagaaaggctcaggattcaaaatgacagaattagtgaatgcacaacatttagggcttgcctttagtaatcgacaagtactaaaagatctcagttttacgatcgaacgtggtagcatgacgagtttaatcggtccaaacggggttggtaaaacaactttggtgcgcctattaatcggtaatttacaaccgacagaaggacaactcgtttttaacccggataagcaaaagctaaacatcggttatgtgccacagtttagaaatttagaagctgaatatccgttgtccattcgtagttttgtgagtttgaatcaacttgatagccacttaccgtggaaatcgcgcaaagaacgccaagcgcttgatcaaattttagaacagacccatctaaccgcgttgcaaaagacgaccgtggggaatgcttctggtggtgaaaagcaaaaggcgtatttggcccaagcattaatcagtaaaccagacttattgattttagacgaatcgacagcgagtttggatattgaaactaaagaagaagtgatggccttggttgcagagttgaaccgggaacatggtttgacggttatttttgtgacccacgatttagaattagcccggaaatacacggatcaatacctatttttaaaacgaggtcaatatgaagccggaccaatgagtcagttggatcccaatttggaattagattaaagcggaggataagcgagtgttaacttttgattttatgcggcatgcctttgtcgccagtacttttatcgcaattacctgcggtttaatcggggtatttgttgttgcgcggaacatgtcatttctagcgcataccctatctgaaattggatttgccggagcctcatttggggttttcatgggaattgcaccattgaatgggatgttattgttcacgttactcagttcaatcacgattggtcagatgagtgccaaagaatcacggcgagaagcgtcgattagtgcgatttcaagtctgtttgtcggttttgggattctctttttatccctttcaaaccgaaatgctagttatgctaccaatattttatttggttcgattattggcattagcttagcagatgtttatcaattaatcatcttatctggggcaattatgattgggctgttgatcttttaccggtacttggtatttgattcatatgatccgattggcgctcaagcacaaggtttaaagaccaacttactatcgatttatttcttaattttattagccgtcagtgtcagcattgctgctcagattgtggggtcattactagtattcatcttagttacgattccggcgttcattgctaaatatttagcgaagagcgtacccgggatgttggcaatctcggttgccgcagcgttattaggggtttggctcggtttatggcttggttatctaacgaactggccagtgaccttcttcatcgccacgattgagtttggcttttactttattgcattgttatatcatcgacgaattagccgttaaaaaaacgtcctcaatcattgaggacgttttttcatgaggcttaatttaggttagcaagtagggcttcgagttgatccagacgttcttcgaaaactgcaaaagcgcgttcgagatagtcggcactcgtcatatcgacgccggcttgttgcataatttcaattgggtaggcggagctcccagcttttaggtagtctaaatagtgatcgagagcaccgggctgtttggtgctaataccgttagcgagagtcgttgcagcagcaaagccggttgcgtattggtaaacataatagttcatgtagaaatgtggaatccgagtccattcaagggcaatctgtggatcgttaacgacgtcaggtccgtagtagcggctattaatgtccgcatattgttgtgacatgaactcggcagttagtggctgaccattggcagcggcagcatgcatcgcatgttcgaactcagcgaattgcgtttgacggaaaacagtgcctttaaaaccatccaaatagtagtttagtagataggcctggatcttaggatcagactgtgtttgcaataaatattccgttaagagattttcattggttgttgacgcaatttcggccacgaaaattggatagtcgccataaacataatcttgggtctgacgggtgaaggcgctgtggacactatgccccgtttcatggaccaatgtgtataagttgtttaaatcatcttgccagtttaataaaatgaaggggttggtgtcataagcgccgccagaataggcgccactccgtttcccttggttttcacaaacatcgattaagcggtcatcaaaaatatgggcaacttgtttggcgtaatcgggtcctaggatcgacaatgcttctttggcagttgcttgcgcctgctcataagtgtaggttaatgcgggttttcctaaaagtggtgtgtagagatcaaacatgtgtaattcagataaattaagttgctttttgcgtaattcagtatagcgatgtaaaagtggtaagtgttggttcacttgatcaaccaaggttgtatagacggcttctggaattgctttgggtgctagcgctgcttggcgtgcactatcgtagtgatggacttgagctaagtaattatgacctttgatttcagtggcaagcgtcgtcgcaaatgtatttttgaattgaccataagttttgtaaagtgcttcgaaggctgcttggcggactgatcggttggctgattgcaaaagttggctgtagaccccgtctgaaagctgaaacgtttgtccgttttcgtcagtcacttctgggaattgtaaatccgagttgtctaagacgctgaaggtttgactagcagcactgaagatatcaccggcagcagctaacaaggcttcttcttgcccagataagacatggtctcgactatcggtaatggtttgaatgaaatggctgtatttggctaaagcaggggattctgacaaccaagtggtcaattgaacaataggaattgcgagaatcgcagggtctaagaaagcagcggcggctgaaacttcggccgctaagctgtccacttgggcttgatagccttgataagttgcgttagcagtatcctgatcatttttcatgctagcataaacgtaaattgtttcgagttggcggaaagtggctaagatttgtttgattgtagcgactaattgatcagccgattcaaacggacgatcaagtgttttgagtgtgggtaattgcgttttaactttcttaaaggctacttcaaaagctgcatcatttttgaaaatcgtggttaagtcccatgtgagcttttctggaacagcattgcgggtggggagttgttgagttgacatatgaaacctccataattaagactaattgtttatattttagcataaaagcgcttaggaaagtgttgttcaacaattgaaggaattattaaaattgtgtaacttttcttaaaaggcgttgtttgaaatgataattccgctataatagcaacataacattattaatgccggtatgatacatgatagaagggaaacacctatgcagaattctaaatttttcggatctcgagaagcaaactacaaaaaagttaaaaagcatcgcacgatgaaagttttgatactcattctaacgctagtcctcttcggtggcggcgcgtatgcattacgcatcagtaatcaagtgaagtctgcaacgaataaaatttataaaccaaatacgactaaaaaagccgctaaaacgattaaacataaaaaaccattctctattttattactcggagtggatactggtgctgagggccgggttgataaagggaattccgatacaatgattgtggcgacggtcaacccagataaagagcaggtcaagttggtcagcattcctcgggatacgctagtgcagttacaaggcgcagatgaatttaacatgcagaagattaatgctgcctataatgttggtggttctgatatggcgatgtcgacggttgaaaagatgttcgatgtcccaattgattactatgtcacggttaacatggggggcttatcgaagattgttgacgctgtcggtggcgttgatgttgacgtaccctttacgttcgaatggaacgggagcgagtttactaagggcaagatgcatctgaaaggaaaagccgctttagactactcacgaatgcgttacgatgatccagaaggcgattatggccgtcaaaaacggcaaaaacaagttatcacgtctatgattaattctgcagtctcgcttaaatctttgaccaactttgaatctatcttagactccttgtcagatagtgttgccactaacctcagttttgatgacatggtagcgattcaagcaaattatcgaaaggcagctaaatcaattgagtctgatgttttaattggacgtaatgctgatattgatggtagttcgtatcagattccaaccaatgaagaaatccaacgcgtttcagatgtcttgagaacgtcactgggattagagaaaacaacgattaacaacgcagaaaccaaacaaaacgatttgaataccaactttacaggtgaagaaaatcatcaagagtttacggtttattctgaaagtgtcatgaatggtgaaaagagtgctgcaacgacgacgcaaagtaactatggctactcgaacagtgcaacttatagtggtaacaacgattacagtaacacgaccaatacttggcaaacgcaacagtctacaaatcagtggaatgcgggctattaaaaatgaatggaaaagcggtcctttgcaaaaggggaccgctttttttgtggactaatttagttgcgtttaacaagtgattatttatgcaattagggggtgaacaatagtttacatttacaagggggaacggtattatttaaagcggtacgaaaaagacaaatgaaggatgtggcgtgtcgtgtatttgcttgtaaatgttgttggattactgatttttattggagtcggctttctgttctcaaagaaaaagaaagaaatcgattggcgctccgtcttaatcatgttagtgattaacttagtgcttgcttggtttttaacgagtttttcaatcgggcgggatattgttttaggtgcagcaaacggctttaactggttagtgcaagttgcctatactgggattgcttttgcactaccaagttgggtcaatgtgaaacaaatggatttcgttgctagcgtgttattaccaatcttgatgattatcccattattcgatatcttaacgtatatcggggtcttgccttgggtgattaaatggttaggccgtgggttagctaagattacgggacaaccaaagtttgaatcattctttgcagttgaaatgatgtttttaggcaataccgaagcattagctgtttcaagcttacaattgaaacaaatgaaagcagaacgaacattaacacttgcgatgatgtcaatgagctgtgtgacagcttccatcatcggcgcatatacacaaatgatgccgggccaatttattttaacggcgattccggtcaacattattaacgctattattgtcaccaatattttaaacccagtgaaagtcacacccgaagaagatacgattgctaaaatgggtgggagtggttccgcagctgttgaagcaaccgaaatggttgaaggcaaagtggaacgtgaaccattcttctcattcttaggtgattcaatcttaaatgctggtaaattagttttaattatcacggcaaacgtcatcgcctttgttgcgttggctgccttgatcgacaaggtgcttcaattagtgaacccttggattacccttgaacatttacttggaatcgtgatgttcccattcgcatggttaatgggacttgatgtgcaccacgcttttgaatttgcacaattcatggggacgaagttggtgaccaacgaattcgttgtcatgggtaaagtccaacattcaatcgggagcttcgcaccacattaccaagctgtcttaacggtcttcgtgacatcatttgccaacttctcaacagtcggcatgatcatcggcgccttcaaaggccttgtggaccgtgaaaagaacgacatgattgccaaaaacgtcggctacatgttgctatcaggaatcttagtatcacttctttcagcagcaacagtcggactatttgtatggtaatttaaagagtgcgcaggcagtcggttatcttctgaggattagcctaatcaggcggattaccgacaaagtcggtgatttgactgatgtagctaaccggaagaagatggctgccaaagcacgtttagagtgcgtttgatgacggttaacaactgagcattaatacaaaattcccaataatccgggtttttaggattattgggaattttagattaagcggaaattgttgtcatcaaaagcacgtttagagtgtgtcattaacgggttgcttttgaacacttgcctagtgttgtgaataatcagcacagctgattgtttgcaatacgtagcaaaacgcagaaagcagttaatgaaagcacgtttcaattcaatcaatttacggcgccaacttaatcttggtgccgcattattgggctatggccaaggggtaaggcaacaggttttgatcctgtcatgcgctggttcgaatccagctagctcaatccaactgcaaaacttgacggttaaagggctttgtgatatattttggacattataataaaatgtagccatcgataaagtacttggttttagcgatcaatcacagagagagtaaccccgttgaaagttacttattgattccagttgacagcttttgaggcttggatgaatatcccgctagcagatagcgttatcaacagctgaaattaaaggtggtaccgtgcgcaaagcacccttgtcgaaagacgagggtgctttttttattttttataaaatgtagattcagagaggattggcaaatatgagaacaagaacaacatattgtggattagttggggaagaatttctcaaccaagaagtcgtattacatggttgggttcaaagccaacggaattttgggaacttaattttcgttgatttaagagatcgcgaaggcatcgttcaattggtgtttaatcaagacacagatgcagatattttccaagtagcaagtaaattaaagagtgaatatgtcgttgaagtccaaggaacagtgatggcgcgtgatgaagcggccattaatccagacatgaagacggggaaaatcgaagtgattgttaaagacttagtggtcttgaacaaagctgaaaccctcccatttgaaatttcagataacaatacggcttctgaagatttgaaattgaagtatcgttatttggatcttagaagaccagaaatgcaaaatgccattaaaacacgggctgcgattactcgtgcagttcacagctattatgataacaatggttatttaaatatcgaaacaccgaacttgacgagttcaacacctgaaggcgcacgcgattatttggtgccttcacgggtttatccaggtagtttctacgcattaccgcaatcaccacaactcttcaaacaattattgatgtcagccggctttgataagtactatcaaattgcccgttgttttagagacgaagatttacgtggggatcgccaaccagaatttacacaaatcgatgttgaaacaacgttcttatcagacgttgaaattcaaaccgaaacagaaggtttattgaaaaaagttatgaaagacgtcaagggcatcgatgtgcaaacaccattcccacgtttgaaatggcaagatgcaatggacaagtatggttcagataaaccggatgttcgttttgatatgcaaattcaagatattacagaaatcgtgcaagattctgacttcaagccattctctgaagctgttgaagcaggccaatatgtgcgcgcaatcgtcgttaataatgccgcccctaaatattcacggaaagcgttagacgaacaacaacaatacattgaacgttacggcgctaagtcattgttgtgggcgaaatacgctggtgataaattatcaggggcttctgctaaaggcttattaccttaccaagaagcgcttgttgaacgtttgaacttaatggatgatgatttaattttaatcgttgccggtaacttccaagtggtttgtgatagcttaggttacttacgaacacacttcgctaaagaaatggatatgattgataagagccaatttgcatttacatgggttgttgattggccattatttgaatatgatgaaggctttggcaaatggattgcagcccaccatccattcacgcgtccacgtgatgaagatattccattgttggatactgatccacataaggcacatgcaatttcatacgatatcatcttgaatggttatgaattaggtggcggttcactccgtatttttgatccagaagtccaagaaaaaatgttatctgttttaggggttgcccctgaagtggctcaagaacgtttcggccacttattaaatgccatgaaattcggtttcccaccatcaggcggcttagcgattggtttggatcgtttcgcaatgttgctcgctagtcgcgacaatattcgtgacgtgattgccttccctaaaaattcccgggccacagaaccaatgaccaatgcgcctagtgaagtgacaccggaacaattagaagaattaggtatcgaagtgagtcctcaaaagaaggactaaccagcatcaaatgaagtcaattaagtaaaggagaattgccatggaagaaatgtttacgattttaggcggcatggggacggcggcaaccgaaactttcgtacatctaatcgatgaattaacaccggctaagaaggatcaagattatctgaattacgtcgtgttcaaccacgctgaaattccagatcgcacagcctacatcctcgacaacagccaagaaaatccgttgcccgtgatgttaaaagatattcgccaaatgaatttgttagcgccgaagttcatggtaatgacctgtaacacagcccattacttctacgacgaattacaagctgccgcagatttcgacattatccacatgccacgggaaacggtcaaacacatgcaacaaacaattcccggcttgaagaaaatcggtgttctcagcacaaccggaacccgacaagccggtatttatcaaaaagcaattgctgcttttggtcttgaaagtgttgttcccgaccaaacattgcaagatgccacgatgagtttgatttatgatgacattaaggcgactgggacattcagccatgacaagtatcaaaaaattgtcgatacaatgttaaatgactatgattgtgacgcggttattttgggctgtaccgaattgagtgttgcacagtcggaatttccattgtatcccgacaaagtgattgatccgatgacagtggtcggccaaaatattgtcgacgggctatacaacaagtagcaattactaattaagttttaacaaagagcatcctgagctgacgtatattgaacggcagtctggtatactacgataaatattgatatagaaggtgacagcatgcaagcaaacggtaaaaacttcacccccattttattggggagcgattttaacgtttacgggatggcccgttcgttttatgagatgtatcatgaacctgttaaggcctacgcaagtcaggaattagcaccaactcggtttacaaaaatcgtcgatttagaattgattccaggcttcagtgaagatcctggattcattactgaaatgctaaaattaaaggaaatctatcgcgatagcgatggcccagtcattttgattggctgtggtgatggctatgcgagcttaatttcacaacataaagcggaattggaagatgtctttgtttgtccatatattgatcacgatttactagaaaagttgacttataaggaaaccttctatgaaatctgtgacaaatatgacttaccttatcccaagacgcacatcattaccaagcaaatggttgaagataatcaggtggaacaacctttccaatatccagtggcgttaaaaccggcggattctgtggaatggcttgatgtgcattttgaagggcgcaaaaaagctttcacgattaaaagtgaagctgaattccaagacatcatgcgaaaagtatatgaaaatggctaccaatcagacatgattttacaagacttcattcctggggatgacagtcggatgcacgtgatgaacatctatgttgaccaacaacatcacgtgaagatgatgtgtctgggccatccattattggaagatccagcacccgcagctattgggaattacgtggcgattttgccggaatacaacgcacaaatttatcaacaagtccaaaaattccttgaagatatcgagtttacgggttatgccaacctcgatatgaaatatgatgaacgcgataacacctacaagttattcgacatcaatttacggatgggccgcagtagtttctttgttaccttgaacggctataacttagcccagtgggtggtgcgcgattacgtgacaaacgacttgcaagatgaacctgttgtttgggcgaataaagatgaagacagtcccgcactttggttgggcgtttcagtggatgtctttaagaaatatgcccgcaataatgccgaaaaagacaaggcattggcactcatcaaacaaaaacgttacggcaccacttttgaatatagcaaagatatgaatctcaaacgctggctattgattaaatggatgttgcacaattaccgcaaaaatttcgcgaagttcttcaaagaaaataaggaataacgtcgcttaaaactttaaaaagcacatcatcgttgaacgatgatgtgcttttttagcagcattagaaaaaatcccgccgcagggttgcaggtttgtggtaaatgatgcaatatgaagttggagaatcgctgtggcatttatggtttgatttttgaatgagtgctttatttttgagacaaaaacgatataataaatcaaacaataaatttacaatgctagccgttattttgactgtcaattagcgttaaagtgcttttagatgcgattatgaatgtagcaagtaattgaaaaaggtggaaaaacgatgcactcattagatattgagcgattaaaagagatgtcaaactttgaagttgccgctttgttcttagaaaattcagaaaaaaatacaatgcataatgcgccaattaatgttggtcgtggggaccctaactggattaatacgcgggcgcgattagcttttaataagcttgtcgaatttggcgtcgaagaatctgctaagaaaattaacgaggctgatggagatatggcgggctacgttgataaagcagggattgcacaacggctgcatgcctaccttgatgccagtcataaaacagatcgatttatattagcctttttagattataccgaaaagcacatgggcctcaatcaggatgatttggttcacgaatttgtcgacggtgcgattggcaatcactatccagtaccttcgagaagtttaatcaatgtggaaaaaatcctaaataaataccttgaagtgtcactatataatggtgaaaaattagctaatcaaacggatgtcttcccaacagagggcggaacagccgcaatggtttatttgttcaaggaattgaagatcagccatatcttacggcctggcgacacgattgccatcaataccccaatctttaccccttatttgcaaatcccagaattaagtgaatataaattaaagcaattcgatgtgagttccgttgaagatgacaactggcaaatgatggacgccaagtttgaagaattgaaggacccgacaatcaaagccttttttgtggttaatccaacgaaccccacttcgcgggctttcagcaaacacgcgttagctaagattaaagaggtcgttgaagcaaacccagaaattatcatcattacggatgatgtttatgggacttttgtgaatgatttccaaacaatttactcaattgccccccgaaatacgatgttagtttattcgtattcaaaactttatggggcaactgggcatcgtttaggcttactagcagtgcaccaagataatgtttttgatgaaattattgctaagcgaacggctgaagaaccagcaattaaggcagcttttgaaaaacggtactcagttgtggcgcctaatccgcttgcgatgaaattcattgatcgaacagtggctgacagtcgtgaaatcgcgttgtaccacaccgcgggattatcaacaccacaacaaattttgatggcactatttagtttgaccagcttaattcacgaaggtgaaaaggatccatacatcgaagcttccaagaaaatggttgatgcgcgatacaacgctttttgggaatcgatgggcatggaatgtgatcactctaaagaaaacgctgaatattatgcggtatttaacatctatgattttgctgaaagaaagtatgggcatgaattccacgactatttcgaaaagcacgtgagctatcttgatttcgaagataaacttgcagctaaatacggcgttgttgtgatggatggggcaggaatggggactgatgatggctacttgcggatttcattagctaaccaacccgctgaaaattatgccattactgggaaccggattgcccaattactagcagaatactatacccaatttcaagcacattaaataaaaagtaggcgctgtgaggcattttttgcaagatagtctgatctggagcgcgcgaggtgctgaggcaataaacattgtctcagcacctctttttttattggcctgcattaataattgaacatttatcgagtctgtttgtagacgacttttaggaatcatgtataataagcttgagataaaatgatttataaaggagtttagcatggccgacttagtttatcagaatattatcgcggacttaaaaaaggcgattaacgcagaatcatttcccagcatgaaattacccgatgaacggacgttgactgaacactatcaagtgagtcgtagctcggtcaaacgtgcgttaaacattatggctaatcaagggatcattttcaaaaaacggggttcaggaacctttattaatccactttatttaaagggtggctcgttttttaattacaatggctctaacctaggggttaccgacagttttaaagccggtaatcggacaccggggattaaattattagatttccaagtcatcaagccgagcgcggaattgcaacgagacttgttcctgaaaccagatgattttgtttacgaaatcaagcgtctccggttgtttgatgatgaaccattcatgattgaaacgggcttcattccgattaaggtaatgcccgaattgaccgaaaaaattgtgtcgagttcaatctttaactacttggaaaccgagaaaaatcaagaagtcacacgcgctttcctgtcaattttcgcggaaccatcaactgatgatgatcaagcgcacttaaagttgaaaccgacggaaccagttggcatcatggaagggattttcttcttagacgatgggacaccgtttgaattttcaacgatgcgcctgcactaccaatacatgaaatataatacattcgttacggttagcggtcgcgaatagggccgctatttttagatttaaaaaattggtacgccccaatattaaaaatggttgacttttttaaaaagtttagtatgataagagagtagtcagaaacaacaaagttgcaaaagctgcgactggaacttaaagtaaagctattaggaacttttttaaaattaaaaaggggtgctattaaaatgacagattattcaagcaaagaataccttgctaaagttgacgcattttggcgggctgcaaattatatctcagttggtcaattatacttaaaagataacccactattgaaacgtcctttggaagcaaaagatgttaaggcaaaaccaattggtcactgggggacaatctcaggccaaaacttcctatatgctcatttaaaccgcgcaattaataaatataacttaaacatgttctacgttgaaggcccaggtcacggtggtcaagtgatggtctcaaactcatatttagatggtagctattcagaaatctatccagaaatttctcaagatgttgaagggatgaagaaattattcaaacaattctcattcccaggcggcgttgcttctcatgcggctcctgaaacacctggttcaatccatgaaggtggcgaacttggttattcattatcacacggtgttggtgcgattttagataacccagacgtgattgctgctgttgttgtgggtgatggggaagctgaaactggcccattagctgcatcatggttatcaagcacattcatcaatcctaagaatgatggtgctgtcttaccaatcttgaacttaaacggtttcaagatttctaacccaacaattctttcacgcaagagtgatgaagaattaacgaaatacttcgaaggcaatggttgggaaccaatctttgttgaaggcgacgaccctgaaaagatgcacccagcaactgctgctgcaatggatgaagccatcgaaaaaatccaagcaattcaaaagaatgcgcgtgaaaacggcgattcatctcgtccagtatggccaatgatcgtcttccgcgcacctaagggttggactggtcctaagacatgggatggcgtaccaatcgaaaattcattccgtgcgcaccaaattccagtgccaattgacagtgctgacatgcaacatgttgatgcattagtagattggatgaaatcataccgtccagaagaattgtttacagaagcaggtcaattaaaacctgaaatcgcagaaattgcacctaaaggcgatcaacggatggctgctaacccaatcaccaatggtgggattgatcctaaaccattacgcttaccagattaccgtgattatgctgtggataattcagaacacggtaaagtcgttgcgcaagacatgattgttttaggcgaatatgttcgtgatatcatcaaagacaacgatcaaaataaaaacttcagaatcttcggccctgatgaaacaatgtcaaaccgtttgaaccatatttttgaagcaacaaaccgtcaatggatggaatcaatcaaagaaccaaacgatcaatacatggcaacagaaggccgtgttcttgattcacaattatcagaacatcaagctgaaggttggttagaaggttatgtcctaactggtcgtcatggtttctttgcaagttacgaatcattcttgcgcgttgtggattcaatgttaacacaacacttcaagtggttacgtaaggctgatgaacaagcatggcgtaacaagtatccttcattgaacgtgattgccacatcaactgttttccaacaagatcacaatggttacacacatcaagatccaggtatcttaacacacttagctgaaaagaaacctgaattcattcgtgaatacttacctgctgatgctaacacgttgttagcaacaatggatactgtcttcaagagccaagaaaagatcaatttagtggttgcttcaaaacacccacgtcaacaatggttctcaattgacgaagcaacagtcttagttaagaatggtttgaagattattgactgggcaagtacagaccaagatgctgaaccagatgttgtgattgcagctgctgggacagaaccaacacttgaaagtttggctgcaatctcaatcttgcacaaacaatatcctgacatgaagattcgtttcattaacgttgttgatttattgaaacttcgttcacctaaagtggaccctcgtggtttaacagatgaagaattcgacatgtactttacaaaagacaaaccagtggtcttcgcattccatggtttcgaaggcttagtacgtgatatcttctttgaccgtcacaaccataaccttcatgttcatggctaccgtgaaaatggtgatattacaacaccattcgacatgcgtgtcttgaatcaaatggatcgtttcagtctatctaaagaagttgcaggtgacgtacttggtgatcaagctggtcaattcgcacaatcaatggatgacatggttgctaaacacaatcaatacattcgcaatgaaggtactgatttaccagaagttgaagaatggcaatggacaccactccgttaatgcggtgagagtgcgtcactaacggtttgcttttaagcatttgcctaatcaggcggattgccggtaaagccggtgatgtgactgatgtagcaaggcgcaggaggcagttagtgtaagcacgtttaagtggaagagtgcgtttgaactggttatcttctgagcattaactggatttgacgaattgacgatgtaatcgtcgatttggcaaatttggttaagcgcaggaagatggttcaaaaagcacgtttaaatgatagaattctactatcagaagaagggtctgggacaaacatacttttgtcctagattctttttttgtggattagtggtctctgagcctttatttttaggcataataacggtaaactagtagacaagtataattttagaaagaggcgttttttttatggcaaaaaataaaatccgagtgcggtatgcgccaagtccaacaggtcatttgcacatcgggaatgctcgtacagcattgtttaactatttatttgcacgtcacaacaaagggactttcgtgattcggattgaagatactgacacgaaaagaaacattgctgacggtgaaaacagtcagttagataatttgaagtggctaggtatggattgggatgaaggtccagataagcctggtgactttggtccttatcgtcaatcagaacgtcgcgaaatttacacgcctttaattgaagagttagtggctaagggattagcttacgaatcatacaaaacagaagatgaattaactgaagaacgggaagcccaaaaagcagctggcgaagcaccacgttacatctacgaatacgaaggtatgagtgatgatgaaattaaggctagccaagaagctgctaaagcaaaaggcttacaaccagttgttcgtttacgtcttcctaaggatcacgtttacaagtttgatgacattgttaaaggtgaaatcagctttgaatcagatcgtttaggtggcgactttgtcatcatgaaacgcgatgggatgccaacatataactttgccgttgtcgttgatgatcacttgatggaaatcacccatgtcttgcgtggggacgatcatatcgccaacacgccaaaacaattggctgtctacgaagcctttggttgggaaccaccagtctttggccacatgacattgatcatcaatactgaaacaggtaagaagttaagtaaacgtgatgaatcagtgcttcaatttatcgaacaataccgcgaattgggttacttaccagaagcgatgtttaactttatcgccctattaggttggtcaccagttggcgaaagcgaattgttcaatcgccaagaattcatcaaacaatttgatccaaaacgtttgagcaaatcaccagcgagtttcgatcaaaagaaactcgaatgggtgaataaccaatacgttaaacaatcagatccaaacaaaatcatggatctttcgttagaaagcttgattaaagcgggtaaaatcgctgaaaatcctgatagcaaaacgatcgaatgggcccgtcatttgattgcgttataccaagatcaaatgagctacacagctcaaatcgttgaaatgtcagatgtcttctttgaagaacctgaacaattagacgccgaagcgcttgaagaattaaataacgaaacagcacccgttgttttgaaggaattcagcgaacgcttgaaagatttaacattattcacagcaccacggattatgcaaatcattaaaggcatccaaaaagatacgaagattaaaggccgtcaattgtacatgccaattcggattgcaacgacccgcgaaatgcatggtccatcattacctgattcaatcgaattgttaggtaaagaccgtgtcctagcccaccttgaaaagacattagcagaaattaaatagagtgcgtttgaaacgggtagcttctgagcattaacaggatttgacgaattgccgatgcaatcggcgatttggcaaatttggttaagcgcagggagctgtttaaaaaagcacgtttaggaatagagtgcgtttggttgcgttcagcaactgagcattaataaaaaattgagttatccagaattcaggatgactaccaattttttagttaactggaaaagtcagttcgagaaagcacgtttaaacgttcaaaatagaacagcaaaaaagctgaggttgaagtatttcttcaacctcagcttttttatttttgtctagtccgatcaatttcagtccgaatggctttgaaactttgttctgtttgtgggccattattaacggcgaccatcataaacagactatcgacgatgctgatttgtgcaattaacgcgtgtagtgcttcggcgcggtaattggtttcttcggaaatggacaacagtgtcacatcacccaatttagcgagggttgaattgccaaaactggtgatgacaatcagtggaacgtgacgttcttttaagatgcgtgcaatttctaaagcatctttattttgaccactatgtgaaataatcagcgcacagtcttgttcggtgagttgggtggcctgcatcaattgtagatggtagtcttggctgtaaacagttggaatcgcaattcgtaaaaatttgtggtagccatcttgagcgacgattccagaagcgcccaagccaaataaacttaagtgcttggcctggttgatataatcaacggcttgccgtaattgtgcttcagtcagtagtgaacgagttgctttgagcgcgttagtattggatgcgaaaattttatcggccatggtcagatagtcatcattattactaatttcatggaagagtggattatctgttggggttgcttgtttagcaagtaacgccattttgagtgcctggaagtttgcgaaggtcaacattttggcgaaacgggaaatagtggctgttgaaacaccacagtcagccgcaaattcttgaatcgttaaactttgattgaaatgttcagtttttaagatgtaatctgcgatttgtttgtatttttcacttaaattcgtgtagtacgcacggagtaaggaatcgatgttttgtgtcattgaagtgcccccctgttatcgatagtatagcataaaaaacaacaaagaaaattattttctcgaaaagggttgattgaagaaaataatttacatataataaagacattaataaaagtgacatgaaattgtggataaggggactagcaaagatgaaattagcaatgattggtttaggcaaaatggggattaacttggtcgctaacttacgacgtaatgggcacgaggttgtcgcctttgacttaaatgaagcagcggttcaagaagcaacccgcttaggtgcattacctgcaaaggatattgatgatgtggtggcacaattgccacaacctaaaattgtgtggagcatgttacctgctggtaagccaacacaagccacaatcgaaacgttaagtaccaaattgacagccggtgacattgtcattgatggtggtaattcatttttcgaagattctaaacaacacaatgcattgcttgccgcaaaagggattcatttcttcgatgtcggaacttctggtgggatgagcggtgctaacgcagacggaaacttcatgatcggcggtgacagcgcggaagtcttcaaacagattgaaccgatttttaaagatattgctcaaaaagatggctatctctataccgggaaggctggtagtggtcattatctcaaaatggtgcataatggaattgaatacggcatgatgcaatctatcgctgaaggattcgatgtgttatcacatggtgagtttgaatatgataacgaagcggttgctaaggtttggagtaatggttctgtgattcgcggctggttgatggaattagcggaatctgcttttgcaaaagaccctaacttagaaggcttaaaaggtatcatgcactcatcaggtgaaggaaaatggacattagatgaagccttgaaattacaagtcccaacaccggtcattggtttatcattgatgatgcggtatcgttcacttgaagatgatacattcactggtaaagttgtcgctgctttacgaaatgaattcggcggccatgcagttgataagaaataagtggtatcctagtaagtagtcagtaaacaccacataaacgaggtaattatgatgaaatatatgattggtgcggatattggaacaacaagtacgaaagcggttttatatgatttaaaagggaatgttaaagcttacgcaaacgttggttatcctttatatcaaaccgtacccgatatggcagaagaagatccggatgaaatttttaatgcagtgtcagaagtattacgacaggtgatgcgcaagggcaacgttcaagccggcgaattacagggcgttagtttctcggctgcgatgcacagcttgattctgatggatgcaaatgatcaaccgctaactcgggcaattacttgggcggataatagagctgctaaagcaagtcaacaattgaaagaaaatgggttgggccaagccatttatcaacacactggcacaccaatccatccgatggcgccactttcaaaactgatttggctgaaagaagcgcaacctgaattgttcaaccaagctagtcaattcatcgatattaaaacgtatgtcttccaaaaacttttccatacgtatcaaatggattattcaatcgcttcagcaaccggcttgttcaacatttttaatttagattgggatcaacaagcccttgaagtggctggtgtcacacgccaacaactacctgaattagtcgaaccaacggattatgttaaagggattgatccgatctatggtgaattaaccggcattggtgctgaagtaccatttatctttggcgccagcgatggggttttatcaaaccttggggtaaatgcaattgatccaggcgtagtcgccgttactatcgggacaagcggtgccgtgcgagtggttgttgatcatccagtggttgatccaaacggtaaattattctgttacgccttaaccaaggataaatgggtggtcggtggaccagtcaataacgggggaattgtcttccgttgggtgcgcgatcaactttttgcacctgaaaaaatcaaggctgaacaaatgcatgtttcaacatacgatattttgacacaaattgcggcagaaattccggctggttcagatggactcttattccatccttacttgggtggcgaacgggcaccaatctgggatgcagatgcacgtggatcatacttcggtttgacgcggcaacatacgcgggcgcacatggtgcgtgcagcgcttgaaggcatcgtttataacttatacatggtgatgctgatgattgaaggtgtggcaggtaaaccaaagagtattcaggcaacgggtggcttctcccgttcagaattatggcgccaaatgttggcggatgtctttgaacaagacgtcacgattccagagagtttcgaaagctcatgtttaggtgctgctgtcttagggatgtatagtttaggcttagtggatgatctatcagctgtcaaagaaatggttggtgtgacgaatgtgcatcatccagaagaagccaactttgaagtttatcgcgaactattaccaatctggattcgattaacacgggaattaaatacggaatacggcgcaattgctgacttccaacgcaaacatatgcaagttaaagagtaacgaagtgaactgggtctgaaagcccagttacttttaacaatatcatgatagcgcaaacattattgaaaatagggaaaattatggcattagtagtcctattattgggcattatcttattactcgcccttattattcgatttaagatcaatacgtttatcgctttagttataacggcaatggccgttggggttggcctaggtatgccattaacggacattgcaaccagtgttcaaaacgggattggcggtcaacttggtgagctctcaattgtctttggctttggtgccatgatggggcggttagttgccgacgctggtggcgcgtttagaatcgcgcataccttaatcgatatgttcggtaaaaaagacttcaaattgcaattatgttggcttcgttcatcattgggattgccttattctttgaagttgggatggtcttgttagtaccaatcgttttcgcgattgcaatcgaagtaagtgtgtcaattttgtaccttggaattccgatggctgcagcactttctgtcacacatgggttcttgccaccccatccagcaccaacagcaattacctcagctttaggggcaaatgctggtcacgtattgttatatggggtcttaattgcgatcccttcagtgattattgccggtccattattcactaggattgcaaaacgcttagtaccagatgcgttcgcgcgccaaggtaatctgacggcacttgggcctcagaaaacctttaaattagacgaaacaccggggtttggaattagtgtcataacctcattattcccagtcattttgatggctgtcaccacgatttatcaaatggcctttaacggcgggaaattacctaaaaatccaacgatgctggattcaatcgtcggttttatcgggacaccagccattgcaatgaccatttcattgatggttgcgatgtatacgatgggttgggcgcgtcggattaaaaccctagcgattatgaagacgattgaagaagccgttaaatcaatcgcgatgtcactcctagtcattggtgggggtggtgcgtttaaacaaatcctcatcgacggtggggttggcgatagtgtcactaaattattcgcaaatgccaatttatcaccactattattaggttggttaatcgcagttgtcttacgggtggcattgggttcagcaactgttgcgtcattgacggcggcaggcttggtcttaccactaatgcaatcagccggtgtgaaccctgcactgatggtcctttcaattggagccggcagtttagcggcttcccacgtgaatgatgccgggttctggatgttcaaggaatactttgatttaagtgtcaaagaaacccttgcaacttggacagttttggaaacattgatttcgattgttgggttaattggcgttttactattaagtttagtcgtctaaataaaagttaaatgacgttggctgttaaagacaggcaacgtcatttttaatagcacttaaggtgggcaattatttgtaatcggttacttaaaaaaacgctgagaaacagcttttttttaatcttgttcagggacaacatcaaagagatatgatagaatgggtaaggattaatttgaacactggagacgatcagagttaggtcatcctaaaatcaaagtcattgaatcctaatagttgaacgactcaatcgaagagaaagaggtacttatatggataagaagcagcgagaagattcacaaaagggtgaacttaatcaacaaaagcatgagaaattcatacactatgctgatggcacgagtcttgaagaaattaataacacggttgcgattcccaagaacgctggtttttggcggacgttgatggcctttatgggacctggtgcgttagtggccgttggttatatggatccagggaactggatcacgtcaatcgccggtggtgcgcaatacgcatacaccttgatcagtgtgatcctagtatcaaacttaattgcgatgttattacaagcaatggcagcgcgtttaggaattgtgaccggaatggatttagcgcagatgacgcgggccaaaaccggtaaaaagatggggattttcctctggattgtcaccgaattagcaattatggcgaccgacatcgccgaaattattggttccgcaattgcgttagaactgattttcaacatcccattgctctggggtgtcttaattaccgcatttgacgtcttgctattattactattaatgaaacttggtttccggaagatcgaagcgattgtcgcaaccttggtggccgttattttattcgttttcttatacgaagtgattctagcgcaaccaaatatgggcgacgtaatgcgcggatttgtaccaagtacacggattgttaccaaccagaagatgctattcttggcattagggattgtcggggcaactgttatgccgcataatctctacttgcattcgtcaatcgcacaagcacgtcaatatgaccgtgacgattacgcggaaaagaagaaagcaatcaagtttacagtcattgattcaaacattcaattatcagtcgcatttatcgttaactgtttactcttagttttaggggcagcaatgttctttggaactaacagtgatttaggacgattcgttgacttattcaatgctttacaaaacaaagaaattgttgggagcattgctagcccaatgttgagtttactctttgccgttgctttattagcttctggtcaaaattcaaccatcacagggacactttcaggacaaatcgtcatggaaggtttcgttcgcatgaagattccattgtgggcacgacgggtgattacccgtgggttatcaatcttacctgttattattttcacggtttactaccatgggaacgaagcacaagttgaaaacctcttgatttactcacaagtcttcttgagtgttgcattgccagtctcgatgattccattgacaatgttcacgagtgatgaaaaaatcatgggcccattcgttaaccgcccttgggtgaaatatacggcatggtttgtcacaattgtgttgacgcttttaaatatctatttgattctacaaacaatcggcctagttggctaatgaataggtgctcgttaatccgtaaattgatatggattgacgagcgctttttttgttcggtatgctagactagagataaggtattatttgggagggattttattgtttgaagtaacgagtgtgcatatcattattcgactgctactggcaaccttaattgctgggattatcggatctgatcgggaatataagaaccgcccagccggaatgcggacacacattctggtctgcattggtgcgtgtgtgattgcgatgattcagcaggaaatcgcagcgcaaaacgttcaatttgcattagcgcatagtgcgattagtaccactattcgttctgatcaagcgcggctgattgcacaagttgtcagtgggattggttttttaggagctggaacgattattgtcacccgccacaagattcaaggattgacgacggcggcctcactttgggctactgcgggattaggacttgcaattgggatgggctactatcaaattgcggtgatcagtgcggtctttgtcattttcgtgattgtcttcttgaaaaagattattcacatcaatacgttgaaaaaaatcgaaattaagtataagcataaattggaaaccaaggagtttattcagagctattttgaacaacatcagattcaaattcgcgatgtgaacttctcagtaacgcaaaacgaacgtgatacgatttacactaacgtctatcgcatcgaaattccccgggaaatgcaatatgcagaaattgtggaagatatctcgatgaataagaacatcatgacgattcgaatggtcagtgtctaaaagagtgcgcaagcaggcgtttatatttcgagtattaactggatttgtctgcaatcgccgatgcgacaagtttggttaagcacaggaatatgcctgctggagcacgtttaaaaaaagtgtgctgtctcaatcgggaaatacatttacgaaaaaagaagccccctgataaacttttttatcagggggcttctttttatttcagtctaattaaacgcaatttgtctgtctcttggtaagattaagttgagaataattgcggcaagcgcacaaatcgaaattggtgattcaagtaagtattggatcatttgaggcgttgctttcaccaatgattgtggcatgatgatgatggcgatacatagaatgattggaattccgatgatgtacatatcacgttcttgggtgtgtagtgtgcgaataacatttaacccgttgagcatgatagttgaacaaatgatggcgaaaatcccaccaataactggggctggaatcgctgataagaaggccgctaatttattaaagaagccgaagatgataaaccaaatcccggcagaaacgaatacttttttactagcaacaccggtgattgaaataatgccggcgttagttgcataccctgtaactggtgagccgcctaagagtgcagcgattaaacagctaattccttcaccgataatcccgtgattccattgtttcttactgatgggcgaatccgtaacggcactcattgcaaaccaggtcccggtcgtttcggtcattaaaacggcgtagataatgacgaaggtcatgattgctgtcatcgaaaagtgcataccatagtggaatgcggtgaaacttggcaagctaaaccaactcgcttcgttcacactttgccagtcaaatttaccaagcatggttgctaaaacagttccgcctaataaggcgatgatgatggaactaactttgaagagtttttgtaatttagggaagtagatacctagcgaaacacaaagaattagaatggcgacggtcacaacagccaggagtaagttctcattgatattgccctgtgctttgaaaatgttatcacctaaagcagatggcatcagtgaaagaccaacgatggtgatgattgtgccaccgacgacttgggggactaagctgttaataattttttggaagaggccggtgacgccgagaagaattaacagaattgaaccgacaattgaagcgccaatcaccgttgccatcccgccgtctttagcaccactagcaaagtaaatcccggcgattgccccaattggaacaaatgaagggccttgggaaacaggcattttcataaaaaatttggtttgaagaatcgtaccaatcccggcagcaaggaatgtcgcttgaattaagccggcttttgcatcaagacccatcgccaataaaccggcaatgataacggggggaacgtagacatccattgctaaaacgtgttgtagtcctaagaagccagcttcttgattcgaaatcggctcgtcaggaccgaccattaatttttgagattgttcattcataccagttgtgctccttttcgtggaccagtttaccttgaacgtagacggccttaatttggtgtttggtgtggcggaataaaagttgttcgagttgttcatctggtgtaagacttgccaagcgtggtggcgcttgaacgatttggaaatcagcaagcaatcccgattcaatggcaccagcttgaatgccaagactagttgcaccaccgacggttgccatataaaaagcttgtttagcactgatccgactgttcgcaacaccgcgttggtcagccgcaatggtggcgtcaaccccgtcttgtcgaatttgggaggccgttacggcttgttgcaaattggcatataagctaggggtataaccaccggcgatatcactgccaagcccaattttaatgccttgattaagtaactcgtgtgcggggagaatcccgttaccaaaataggcatttgagatagggcagtgcgcaatcgctgcttgttcggttttaatgatactttggtcagtagttgtcagttgtgttgcatgtgctaataccgaatgttgattcaataatccgaatgattgcaacatctcagagtctgtatggccgtaacgttcgcgtacataatcgtgttcccagtcgctttcgctgcagtgtgtctgaacggtgatgtgttgggactgtgcaagttgaccgagttgctgaagtgtttcagttgtgcaactagggatgaagcggggggtaatgacgggttgaatgaacccattacgataggtatcttgaattgcttgaacaaaagtttgtgttttattaatggcttcttcaggagaagcatcacgataatagtctggtgtttgatctggattatccatcgcaacagttccgatgaaagcccgttgccctgcttgggaacaaatttctgcgagtcgtagattcgcagaattgtgaattgttccgaaatatagggcggttgttgtgccgttagcgagcatttcggtcactaagtcttgatacacaggtgtggcgaaatctaaatcggcgtagcgcgcttcaagaggaaaggtataatgattgagccaatcagctaaagggcgatcaagggcaattccagcttgtggccattgtggcgcatgattgtgtagatcgataaagcctggtaacaagaagtgtccgggagcgagtgtgattaagtggtcatgttggcgtgcagctgataatcgctcagagtattctgacgccgtttgatgaataatgtttgtgatttgaccattatcactgatttctatcagtgaatcttcgtgaaatgaactagaatttggtgaatttgcagaaaaataacttgcttttagtgtgattagcaaacttttaaacctctccttctagatggtgtgttgtaagtatatcacataccataatgcttttaaactttaaaatcgttcgccttttgattcatttctaagggatgctttcagaaaacgacacgtgagcaaaaaggtaccctaaaaaatagcagactgctagaatgaacttaaataagctagttgaaaggatgaatcacatgagtttagcagatgaatttgtagaacggcgttttattgtctttcaatgctataagtgccaacatccagcgatggaaatcacgacgaagacagcactagaagataattcagatggctctaccaagtttcaaattgaaacaacttgcccacggtgtcaagcaaccgatcaatttgttatcaataacggtcaagaaggggaaattagcgcgagtgtcaatagtggcaaagtcgctaaggttgccaacattaaataaggcaatcgacgttcgctaaaagtgaacgtctttttttgtggcgtaaattgtatataattatgaatacatgaataaaaaggctggaaacggttgatttattcaaatataattgacattatgctctttgaattgtatatttattctacttaatacaattataaaggacttattgaaatggcgaaatcaaaaaaaattaacgttcaaggtctcgtattgatgatttttgggtcaatcttcggctttgcgaataccacaattgctttctacttaatgggctatgccagcattatttggtatatcttagcggcaattttctttttcttaccaacttcattaatgtttgctgaatttggttcttctttgaaagaatcacgcgggggcatctattcttggttagaagcatccattggtaaaaaggcggctttcatcgggacgttcatctggttagcgtcatggattgtctggatggtgtcaacagctgctaaagtgtgggtgccgttttcaacgttcctccaaggttcagatcaaacagcaacctggcatttattagggatgaatggcactcaagtggtcggtgtcttaggaattctttggattttattattaactttcctatcaagtcgtgggattgataagattcaaaagtttgcgtcattcagtgggatggccgttgcctttttattcgccgcattcttagtgattagtgtggcgatttggtttaaaacgggttttcatttggcagaaccgattcatgggacgacgacctttgttaagagtccgatgagtagctatcaaacaccaattgggatgttatcatttgttgtcttctcaatctttgcttacgcggggatggaagccatgggcggtgttaccgatagtatggatcagcctgaaaagactttccctaaagggttaatgattgcgacagtcttcattacattaatctacgcggttgcaatctttatgtggggcatctcaacgaactggcaacaagtcttgagcgggaatagagctaacatgggcaatattacttatgttcttatgcaaaacttgggttatcaattcggccatgcctttgggatgacgacacccgttgcgatgacgattggaacaacctttgctcggattaccggtttaatcatgtttatcagttacttaggcgcatttgccgtcttgatttattcaccattaaagtcatttgtactcgggacacctaaagcactctggccgaacggctttgcagaagttaacaagcatggcatgcctgaaaaagcaatgtgggcgcaagcattattagtctgcattttaatcgcggttatttcatttggtggtaaagctgccggtgacttctataatgtcttgactttgatgtctaacgtttcaacatcgttgccatacctctttttagtgactgcctttccatatttcaaggcacgcaaagatttggaacggccttacgaattctttaaatcaccagttgctgttaaggcggtgacgattgtggtcgacttagtccttgtcttcggaattgcctttacgattattcaaccgatgttagaaggtcaatatttagatgccttctggatggtcattggtccgattgtctttacgattatggcccttgctttgtatcatcgctatcaacgaaaagcagtacatggctaaattttttaaaagcgttgaccgatttggtcaacgctttttttgatggcctaattaagggcttgtgaattttaaaagggattaattctcatttaattttaatgtacaaaggaaaatagttgcattttcagattggttccgttttagaactaatctgatttttaaagactaacataaagccccatctagcgattttttaatttttaaagaaagttggttacctaactatcacattagaataaaatgagaataaaagtggacggtgtgcaactttcacaataaacctgtatactttttagatatagttttcagaaaatgaaatcaaagggggattctatgactgtcaaattacaagtcaaaaatctaacaaaaatatttggtaagcgcgtgccgcgtgccaaagaattactgaaacaaggaaaatcaaaagcagcgattctaaaggaaacaggtgcgacaatcggtgtcgaccgggctaacttcgaagtagaatctggcgagatttttgtcattatgggactatctgggagtggtaaatcaacattggttcggatgatcaaccggttgattgagcctactgaaggtagtgtattaatcgatggcgaggatttaatgcagattgataagaaggcattacgtgaagtccggcgtaaaaagatgagcatggtattccaaaattttgggctctttccaaatcgaacgattcttgaaaatacagcctatgggcttgaaattcaaggcattgataaggcgacacgggaacaaaaagcgaatgaagcactcgatttagttggtttaaatggttatggcgatcagtatccgacacaattatctggtgggatgcaacaacgggttggtttagcgcgtgcattagcgaatgatgctgagattttattaatggacgaagctttttctgcgcttgatccattgaatcgttctgacatgcaagaccaactactcgacttgcaagaaacgatgcacaaaacaattatctttattagccatgatttaaatgaagcgctcaaaatcggcgaccacatcatgatcatgaaggatggggaaatcgttcaaaccgggacaccggaagatatcttgacacggcctgctgacgagtatgtagagaaattcatcgaaaacgttgatcgtagtaaagtttacacggccggcaacgttatgattcgcccaacgactgttaatattgaaaaagatggccctcgtttggccttaaaacgaatgcgtgaaaatgaagtttctaatgcttacgttgtcaacagtaaacgtgagttagttgggattattgatgcgcgtgatgtacttgagttagtccgcaaagaaagtcgtgatttgcaatcaatcgtgaatactgaagttccaacaaccgatgaagagacaccaattgctgatatcttagatgatatttcgcaaacgggcattccgtttgctgtcttaaatgataagcaacaattacgtgggattattattcgcggggccgtcttaggggcacttgcaggaaacgaggtgaaccattttgcttaatttaatgacgattgctaaattaccaattgccaattggatggatcactttgtcgattggctgacacaatttactggcttttttaatggtttaacgaattttattggcggaattatcaacgctttccaatgggtgtttgatttaatccccatctggttattcatcgtgattatcgctggcgtcacttatttagcgaatcgcgacaccaaaaaatggggtttaattatctttgaagtcctcggcctactcttgatttggaaccttgatttctggcgggatatgacgcaaacgttaacgttagtgttaacctcgagtctgatttccctcgtaattggggtgccacttggaatttggatggccaaaagcgatattgcccaggcaatatttaaacccatcttagatttcatgcagacaatgccggcatttgtttacttaattccagccgttgccttctttggtatcgggatggtcccgggcgttttcgcatcagtgatttttgccatgccaccaacggttcgtatgacaaaccttgggattcgccaagtgccaaccgaattgatcgaagcctctgattcatatggctcaactgaatggcaaaagttaattaaggttcaattaccattggcgaaatcgaccttaatggctggggttaaccaaagtatgatgttggccttatcaatggtcgtgattgcgtcaatgattggagcaatgggcttaggaacacgagtttactttgctgttggccggaatgatgctgggggcggttttgcagccggcttggcaatcgtaatcttagcgattattattgatcgtttaacccaagctttgaaccggcaacgtaaacattaaggagggattcagtgattaagaagaataaattaatagcttttttcaccttagtggggctcgtcacacttctaacggcctgcagttcgcaaactaagccgtacgctaccgatgagaaattaggcggtcaaattaattacacgattaccggaattgacgcgggtgctgggattatggcatccacacaaactgcaattaacaagtatcatttgaatgatcagaactggcagttgcaaaccagctcaactgcggcaatgaccagtacgttagacaaagcgattgcggataaacgcccaatcgtcattactggttggcaaccacattggatgtttactaaatatccaatcaagtttttaaaagaccccaaaaatgtttttggtcaagctgaacacattaatacggttgttcgtaaggggctaaagaaggatatgccagaagcatataccatcttagatcgattccattggacgccaaaggaaatgtcgaccgtaatgcttaaagtcaatgacggtgttgaacctgaaaaggcggcgcgcgattggattcaagacaatccagaaaaagttgctgagtggactaagggtgttaaaaaggttcatggcacgaaaattaagttaacctatgtggcttgggattcagaaatcgcgtcaactaacgtggtggctgaagttttacgtcaacaaggttatcaaccaacgattcaagctatggaaattcaaccgatgtgggcgtcagtcgcaactaaagcagccgatgcacaagtttccgcatggttaccgaagacctctggtttatactacaaggattacaaaggtcagtttgaagacttaggtccgaacttagagggtgctaaggtcggtttagctgtaccgaagtatatgacgaatattaattcgattgaagatttgaaaacaaaatagaatcaaacagcgtatgcgatctgttcagatagaacatggttagatgatcaaatttcggctgttgaaagagtcggttagggcaaaagttacttttgttccaaccgactctttttttatttgttagacattctctgttagaataggactattgaatgttatcggaggcggaatagatgtctgttaaggcgtttttagattttatcgaattacgcactaaagttggtagcgtgattccctttatggctgggttcttttttacgttgtattatttccaccaaattgatccgatcaataccgtgttgtacttctgtgcattggtgttaattgatgtcttcacaacgggatggaataattacaacgactttcacctcgctaaaaatgaaacgctccagcaatcaaccagtgcattaggacgacaaaatattgcccctaaggttgctttacgctggttgatcggctttataagtacggcaaccgttctggggctgattctggtctggcgcacaaatttaattgtgttagccgtcagtgttctgttcatcttaatcgggattttatatacttacggcccattcccgatttcacgattaccactgggtgagttgttatcgagtctggtattagggttcggtaatttctttttgacggtgtatgtcaacgttccggcggatcagttggtcgatttgcgctttgatgggccgttaatgttattccaactgaattggctgaatgtgattttggtgtttgtggcgagtttaccaactgtcttcctgattgctaatttgatgttaatgaacaatatttgtgattacacagtcgatttagagaatgggcggcacacattaatcagttacattggtcaaaagcgcggcattcaactttatcaacttagtgcgtatagttgttacgtggtgattattgttgggattggcctgaaattatatccatggccagcagcgctagcttttgcgagtggcccaactttgttacgtaatgggtttgcattacagaagagtcaggaaaaacgcgttgtatttggtacagcggttcagaatctaattgtctttaacggtttttggctagtgggaatgttgattggcctctatctttaaatgaaaagtcactgcggtggcttttttatttcaaaaaaagtattgattgtatatacaattttgattataccgtgattattaaaacgcttacgtgtggagatgagagttatgacatatgcaatgattgggacttggcgaatggcctttgaagggattcaaaaagcgatggctgatttaaaaaatggtgggcaaagtacggatgcaattgaaaccgctatcaaaaaagtggaagattaccccttctttaaaccggtcagttacggtggtttgccaaatgcgcaaggcttagtggagatggatgcggcattcatggatggcaacacttttgcaattggtgctgttgcaggaattagtgatgtgaagaacccaatctcagttgcgcgtcaattaagtgacgatcattttaatagtttcttggttggtgcgggagcgtcacaatatgcgatgtttaacggttttgaaagccgtaatatgttgaccgaacgcgcacacaaaatctggatgcaacgaattaaagaaattaacgaaaaaaatcttagcccatatgatggtcacgatacagttggcatggttagtttggatcaagctgccggtatggcagcggggacgtcaacttctggattatttatgaaaaaaccagggcggactggtgattctgcattatctggcagtggcttttacgtggatagcgaaatcggtggcgcaaccgctactgggttaggcgaagatttaatgaagggctgtctttcatatgagattgtgcgcctgatggggaccggtttatcaccacaagcagcgtgtgatcaagcagtctatccgtttgttgagaaattaaaaaaacgctacggcaaagctggcgagttttcgttggttgccttaaataatcaaggtgaatggggcgtggcgacgaacgttgagtttacgtttgcagctggcaatcaagatgcggcaccacaaatttttatggctaatccagggtcaagtcaaacgacggtgatcgaacccatttcagcagaatggcttgaagcctacgcgaaacggattaaagcaccagttgaatagaggaagtggttggaatggttaagtatctatacgttgaaattgcagaagccttacgagatgacattcaaaaaggggtctatgggatccatcagaaattaccatcggaaacggatttagccaatcaattttcaacgacgcggctaacaattcgcaaagcaatcgatctattggttaaacaacatgtcgtggtacgcgatcgaaatcgtggcacctatgtacttgcaacacaaagtaaaatttcgagtggttcatctggtttagttggttttaccgaagcagccaaacagtttcaattggatgtcagcacgcgggtgttagatttacgccggacaatcgtttatccggactatgtggcctccaagttagatttagcaccacaggagccagtttggcagattgaacgcttgcgaatggcagacggtgaagcgatgacccacgaacaaatctatctgaaacaaaaaattctaccagaattaacggcccatgaggcacaagggtcactctaccgcttgattgagcaaacaatcccaatcgggtatgccaatcaagaactcgaagcagtcgtattggaaaaaggcttaagtgacttacttgagacctctccagggcaacccgcttttctagcccacacggttgcgtattcaatggacggttatccaattctttatgataactcgcattatcgtgctgataaatacacgttccataacatcttgcaacgtgaacattaaaaggagggttttaaacgaaagtaattgtcttgttggatcaaatccaagctggattaggtggtaaggaaaaaggggatacccctttaggtggaaaaaaattagcgatgggtgctgcggatacgctcgataaggcattaaaaaaaatggactctgaaattatcgggaccttttattgcggaactgattattatcaggcgaacaaagccgaagtgaatcggaaagttgcgaagatgagtgagaaaatgggtgcagacgttgtgattgcgggaccgacctatgattatcgggacttttcgacgatggcgtgtgaattagcagccactattcaaaaagaaacaacaattccggttgttgggctgaccgcgatcgaaaagaatgccgatttaattcaacagtatcaagatcaaataacgattgtgaagatgccaaaaaaggatggtactggtctttcggattcaatcgaccacgcattgcagttatgcaaaatgaaggttgaaggcgctgattttactgattttattaaccaatattgttattaaaaggaggcaaaaccgatgcaaaagaaactcgaacagattttgatgccggttacgattaaactggggaataatgttgtactccgatcattgcgagatggtttcttaatcattacgccattgattatcgtgacatcgattttcttactgattgggaattttccaattcctggttggactgaattttggagtgggattttagggccgcactggacagaatggtttagtgctgtttctaatttagtgtttagttttacagggttgcttgcttgttttgggatatcctatgcctatggtaaaaaccgagggttacaagcgattcataccagtgcaattgctattatttcattcttaattttgacaccgactgttgtcaccgttggtaaaaaatcaatcggtgccattcaaacaatgtatttgggacctaacgggattttcctagggatttttatcgcattagtcagtgttgaaatttaccgttttgcgattaaacgcaactggcgaattaagatgccagatggtgtgccacctgcagttagtgaatcattcgatgccttactaccggctggcttagtggtattagttttcttcttaattcgaattggttttagcctttcgagtttcgaaacggcctacaatttcatctacacgttactgcaacaaccgttaaaaggtgccggcaactcattaccatctgtattgctttataacttcatcgcaatgttgctctggtgttttgggattaatggtccaactatcaccaacagtgtgtggtcaccaattttcttcgttctgacgcaagataacttaacagcattccagaatcatacgcagttaccacatattttcacccaacaatttattgacatcttcaccacatacggtggcggtgggagtaccccctcactcttaatcgtcatgttaatcgtctgcaagtcaaaacgcgtcaaagaattgggtaagttggcaattgtccccggtattttcgggattaacgaaccgattatcttcggtttgccagtcgttttaaacccaattattgcaattccattcattatcgtaccggttttaaatacattgatttcagggattgtattccaactcggatgggtaccgtatacaaatggcgttatgttgccatggacaacaccaccgattatttctgggtggctttcaactgggagttggacagggtcagtcctccaattatttgaattagtgcttggaattttaatttactatccatttatcatgatgattgatcggcagtatttggcggaagaagccgaagcggctggcttagacgatgttgatattaattttgacgaaatttaatagaaagaagccattcttgtgaaaccgattagagcagattttaaggcattatttcaagcacatgctgatgagttcttagcggacttgcgggaagtgttacgcgtgccgagtgtgtgtggagcgcaaacgtttgaagcgccgtttggaattggtccgaaacgcgcattggaaacagtgttggcgattgctgatcgaatgggctttaggacggggcaagtcggcaattgtgttggctgggcagaatatggaccagacgaaacgcaagcgccaacttattttgggattcttggtcatttagatgtcgtggatgttgaagatgattggcattatccaccatttgaactgactcaggtagataatatgctgtatgggcgtggtgttttggataataagggaccacttttatcgacattatttgccctgtatctgattaagacgcaaaagataacatttaaacaacgcgtccgaattatttttggcactgatgaggaatctgggagtcaggatatgccaatttatttggcggaacattccgcaccatatgccggattcacaccagattgtaaatttccagccgtctacggcgaacggggcttgttagatgtccagttagcgttaccgattacggacggctctgagcaacaaattacggcgattgaaggacggttcgctaaaagttatctgccagatcatgcacagctgattttggccgatggcacggttaaaacttatcacggcaaaaaggcacctagcaatgcccccgaaatggtggataatgtgttaccgaagttagttgccgatgcaagtcaactcactggtcaaacgggtcaattttatcaatgggtagccgctaaaatcgggacgcagtcaactggggaaaactttgggattaattatcaagatgaagcatcaggagcattgcaacttgctttttatggggtatcgattgaagcccaacagttaagtgtgcatctgacatgtcgttacccaatcccagtgacggaagatcagttgttaactgggattaaagctgccatgttgccggggatgacgttgacggttaaacggcgttatccatcgcaagttactgatccaacattgccatttattcaacaaccctctgcgatttatgcggcagatactggtttggatggcacaccggtcacaacaacgtgcgtgacttatgcgcgcgcgttaccgaacatcatcgcgtttggcccatcatttccaggtcaaaaagggattgcccataaaggggatgaatggcttcaattcagtgactggcaaatgatgatgcagatttattatgatagcttgctcgcagtcggtactggaacataaaaaagcgtgtgccataagtcgggataccctgaggattagccggaaggggatgacttataagaacacgtttagacgattaaagttctaatatcaaaaaaggggctgagacaaaatttacttttgtctcagccccttttactgtttagcgacttgctaatgcgcccattggatcccatggtgcgagaacggttgggtgatcgtattcttctgtttcaatgcgtttcatttcatccgttaagaagcgtttgttgatcacgatttgataaacaaattcgtcaaaccaactatcactcatgacgaagtaacctttcgtcccaactttgtcaccccatgagttttcaaccttccatttggttggttgaccatcgacgaggtcgacaccggtgatgaccatcgcatgggtcatgagactttcaccgtaatcaaggcgttcgcctttagaaattgaaagatccatgccgagcatggcatctttttgataaatttcagtgtccatgatgccgagtttgcgatcagatgattggcctacatcgctaccgaaccaaacggattcacctgcttgtagttgtttaatcgcgagttgtttgaaagtgtcgatgtcgaggtttaaatgccgcacttcacggccaccgaccacattgcccaacatttcaacgctgtataagtggttgtatggtttgtcggcagttggtgagttaatcaatgaaacgtaattttcgaggtcccagccaacgtatttttgatagaacgtttgcggtgtgaggcctttttcgatgtgatagttgtgatcatcatcgcggtattcaaagtcgaattcaacgggtggttcgcccaatgcataaacgagcatccggtaaacttcggttaacatcgcgtcttttttagcttggatgtcggcttcgctaacaccgtcggctactaattggcgtaatgtaacggcatctttacggagtttaaggttcaaaacgccgttgagttcgcttgatttttcactattatatgtttcgggcatgactgacttaggtacaatcccgtatttttcgatgagtgcgcagagcatgtcccattggccgccatcttgttggggcgttgtcattaagaagtcgactttgcggtcgccaattggttggctggcagtcttcaagacgttttcgtagaagtagtttgatttttcgaatttgtcccagaagttggtgtagttttgggacaattcgaaatccttaattttgaattggtcttggaggctgtggcgcattgtatttaacgcggcgaacatccagcaacgaccagattgcttttgattggaaacggcaccggtatctaagtcgattgaaaaaacgggggccattttggcttttgaatcggtattagcactcgtggctaaaaagccgttattcataatggcatttttaattgtgttggattgtggtgttgccttgaaatcggctttgaattgttgaatatcttttgctgtaatgggttgaaccatgtggaaaacctcctctaaaatttggtgggttaaattaaattacccggtttgaatggcattatttttttgaaacgtgctttcatcaacaacttcttccgccttacctcacttgccaaatcggcgactgcattgccaattcgtcaagtgctgtaagtgctcagaagtaacccgttgatggcgcactctgatttgaaacgtgctccgtaagccatatccttccggttaaccctgaacgtcaaacgattgctggcgcaatccttcgctgttctgtgttaatcctcaggataaactcggcttactacgcactctattgcagtgcgtcccatgggtctagcttaattggggtttttgtgagtgcggcttgttcttcttttgtaaggtacgcttttttgacaattacctcgtaaacgtagtcgtcaaaccaagcgtcgctcatactgaagtaaccttttgtaccgactttggcactccatgtgttttcgactttccatttcgttggttggtcgtttacgaggtcgacaccggtgagggtcatcgcgtgggaaacaacgccttgtcggtagtcaagtcgttggtcttttggcatcgtcaaatcgaaaccaaagagtccagaatagtcgtaaaggttgcgatcaagccagcctttttgtcggtccatatccgcgagcacgtcattgccaaaccaaattgtttcaccgttttgtaaggattggatagccagtgcttttaaacgttcagggggtaagtttaagaggcgcattgggtgaccttcgactaccgtgttttgcgattctaaactgtagagttggttgtattgtttacttgtttgggggctgctgacaacggtgatgtagtcgtcaaagttgcgattgagatatttttgatagaaactttgcggggttaaaccgcggtcttcatggtaattttggtcgtcatcgcgataggtgaagtcaaacgtttcgactggttcgccgaatgcgtaaacacatagccgatagatttcacttaagaaaccagtccgcgtttcactgatggttgtttcgctagcgttgtcagcaacaagttgccgtaattgaatcgcatctttgcgcagtttcaaattaagagtgctgttgaattcagtggttaagtcactgttataagtttcaggcatgaccgacttgggcacagcaccgtatttttgaatcagtgccactgcgttgtcccattggccaccgtcaaaatcgggaccagcgagggtgaaggcgacttcgcgatccgtaatcggcttgtcggcagttgctaaaatcttttcataaaagaggttcgccttttcgatgcgatcccagaaagatagataattttgggagagttcgaaattcttaacgtgatatttctgttcgaaatcgtggcgtaatgtatttagagtggcaaataaccagcaccgcccactctttttttgaaagctgacatcaccagtggggaggtcgattgagtaggttggatcaagggtgacggcagcatcggggcgttgactaacggcgttaatgccattcgtcatcacagcatttttgagcgtcgttgcttgtggcacgccagctaaagcggtccgcatcttgattaaattattatgtgtaatttcttgggtcatctaatcactccttaatttttgaattagtttaattctagttgattagatgggagatgtaaaccgaataacggggataaagctaaaagaatggtgattgataaatgtgaaagaaaacgatttatatgagagcacgggacacaaaaaaacgaaccgctgagggttcgtttggaaacgtgctttttaaagctgacgcttgcgcttagctacgtattgcaaacgaccgattttgtcggtcatttaaaacactgtgctagtgcacagtgtcaaatctgctttaaacgcacgctttattttgctgttaaaatcttcacgccatcaggtgcgccaaccacgacttggtcgacgatgtctaggaatagaccatgttcaacaacgccgacttgttcactgagccatgatgccagtaggtggggatgttggacttggttgaggtgtaaatcgatgacgtagtttttagaatcagttaagacgtgttggccgtctgcagtcatccggaattctggatttaagccttctttagccattttgttgaacacttgttggctgccaaatggaatcacttcaactggtagtgggaagcgaccgattgtatcgaccactttttcttgatcgacaatccaaatgttgcgggttgaagtagttgcgactaatttttcgaataagtgcgcagcaccgccgcctttaatcccttggaagttggcatcgacttcatcggcaccatcgatggttaaatcaatgtggtcgacatcgttgagtgctttgaccggaatcccaagtgatttggcttgttcttcagtacgaattgaggtgcagacacatgttaagttgaggtgttctgcttgtacccgttttgcgagggcttccaccatgtaaactactgttgaacctgttccgagtcctaaaatcatgttatcttcgacaaaatccactgagcgttcagctgccatctttttcattgcattcttatccatcaagacaccccttttgtattaataaatctattatacgaaaaaaacgctttaattgggcgctttttgttaaatttttaattaaatcagccttaggcattattcacagcctccgcggtttcatggtatgatacagtggtacaaaaagaacccaaatgggcgataatattaggagttttaggaatgaaaaaacgcggctttgaaattgtgaccaaataccaagaggcgggattgagtttaccggtgcgttcaacagcgcattcggcgggctacgactttgcttgtgcggaggacttcgtgttgccatcaatctggcattacaactttgtgcgtttgttccgaatgattcgaaatggcaaaccgttagtggatgacgattttgaacgcgcatcaaaaacgttgaaaccctttctagtaccgaccgggattaaggcttacatgcaagacgacgaatatttaatgatcgccaatcgttcaagcaacccactcaaaaaagggttaattttacccaacggcgtcggcattatcgatgcggattactacggcaatgatgccaacgaaggtgaaatttttatccaaatggttaacttcagtccgcgggatgttatcttgaaaaaaggtgaacgaattggacaaggcatcttcatgccatatttagtcgcagatgatgaagcgacggtaaccaccaaacgaacgggtgggtttggctcatctggtcgctaaacggtaatcgctaggtcgccgaaaattcacaaacttatgttaaaataaaactaatctcgataatgaaggagaatctttgtggctaaaattaagactcagtttgtttgccaaaattgtggctatagttccccgagattcttaggtcggtgcccgaattgtggcgcttggaaccaaatggtcgaagaacgtgaacaacctgcagctagcgcgaaatcaagttttacgatttcagggcgggcaactgaaccagaacaaatcagcactgttaatattcaaaaggaaccgcgtattaaaactgaattaaacgaactcaaccgcgtgcttggcggtggagtggtaccgggctcattgattctaattggtggggatcctgggattgggaaatcaacgttactcctacaagtttccggacaacttgaaaaggttggtaagattctttatgtttctggtgaagaaagtgcatcccagattaagatgcgggctaaccggcttgatgtgaatggcgatcaactttacttatatcctgaaacggatatgggcaatattcggcatcagattgaaacaatgaaacccgactttgtggtgattgattcaattcaaacgatgagcgaaccagaagtgacttccgcagtcggtagtgtttcacaagtgcgtcaagtcaccgctgaattgatgcgcattgcgaagacgaaccagattacgatttttgtggttgggcatgtcactaaagagggcgctattgccggtcctaagattttggagcacatggtagatactgtgttgtactttgaaggggatacgcatcatacttaccgcattcttcgctcggttaagaaccggtttggttcaaccaatgagattgggattttcgaaatgcgtgaagccggcttaaaagaagtcgcgaacccatccgagattttcctagaagaacgtttggcaggggcgacaggttcagccgtggttgtttcgatggaaggcacgcgacccatcttggtcgagttacagaccctaattaccccaacactattcgggaatgcaaagcgcacgtcttcagggttagatcataatcgagtctccttgattatggcggtgcttgaaaagcgtgctagtctcatgttatcgaaccaagatgcgtatttaaaagcaactggcggtgttaaattagatgaacctgcgattgatttggcgatggctgtttcgattgcatcaagctatcgggataaagaaattccaccaactgattgtttcgtcggtgaaatcggtctgactggtgaaattcgccgggtcaaccggattgaacaacgcgtcagtgaagctgctaaattaggctttaaacgtatttatgtaccaaagaataacttacaagggtgggacgcaccgacggatattcaagtgattggtgtgaccacgattgcagaaactttaaagaaagtattcaactaggcataagttggagcgagaggaggttgaacgatgcaacaaaaacgatttactaaaaaaagaatattaggaattgtgttcattatcttaggaggtgcgcttggaattacggcgttcccagtattttggccattagttcatttggaagacatgatgtatctcaataacggtattactaacgccattttaggggccattattttctatctattattcttggcgctggcaacaccaatgttgagagctatgcaccggcttgaaaaagccttaacgaaacaatcacctagttttattttatttgggagtgttttttcactaattggattgttattagcaaacgttgtttcgattccgctataccggatgcccatttttgcattaaatacagttgtacccattttattgatgattgctttagggtatctcggctttcgaattgggacaacgcgaatggaagaatggcgccgtttgatgcaacctaagaaacgcaatgctgatgtattagaacgtaaagtcggcgataatttccgtaagtataagattctagatacaagtgtgattattgacggccgaataaaagaaattgctaagacgggctttatcgaaggcacattgatggtgccaaactttgtcttacatgagctacaattaatttcagattccgctgataatttgaagcgggcacgtgggcgccgtggactggatatcttaaacgatattcaaaaagacgatagcttatctgttgaaatgtacgacggtgatttcgaggatttaacggaagtcgatagtaaactcgttaaattggcaaaattacttgatgggattgtcgtgacgaatgattataacttgaacaaggtctgtgaatttcaaaacgtaccggtcttcaatatcaatcaactcgccaatacgttgaagcctgcagttttacctggagaagcgatgaccgtgacggtggtgaaagccggaacagaacggcaacaaggggttgcctatcttgatgatggcacgatgatcgttgttgaagatggccaacattacttaaataaaccgctagaagtgattgtgacaagtgcgcttcaaaccgctgcggggcggatgatttttgctagaccagcgcatcaacaaaaaggcttgaaagaaaaatagccacgcagaacactttacacggtcgtcaataatctgtatcatggagaccaactaaaccgttaaaattgatgaagagaataagtagatgatgccaattgttaagagagctttcgaattgctggaagaaagccgattgccccatcgaaatgcacctctgaaatgccaagtgactttgtgacttagccgggacaccgttacctgttcaaggcatttttgcaaagaaaagtggaaccacgctcaatcggcgtcttttgttaaccaacaaaggacgctttttatttggaagagtgcgtttgaaacggtttgacttcgagcatttgcctaataccgtgagggagcgccaccggcgatcgtttgcggtatggagcaaagcacagaagtcagtttcaaaaagcacgtttagaagaagagtgcgacagcaggtggttatattttgagcattaactggatttgacgaattggcgatgcaatcgccgattgggcaaatttggttaagcgcagaaataagcctgcaagagcacgtttaagaaaggaagattcgatgttaaccgtttataataccctcacgcgtcaaaaagaagtcttcaaaccgattcaagcagaccgcgttaaaatgtatgtctgtggaccaactgtgtataactatattcatattggtaatgcgcgcagtgcgattgcctttgatacgattcgccgctatctcgaataccgtggctatcaagtcgattatgtctcaaattttaccgatgttgacgacaagatgattaaggctgcgagtgcagaacaaatcacggttccggaattagctgaacgctatatcaccgcttttaaagaagacacccaagcacttaatattgaaacagcgacgctcaatccgcgggcgacagaaaacattccagaaattatcgcgttcattcaagacttaattgctaaagattatgcctatgccgttgatggcgatgtttactatcgtgctcgtaaatttaaggactatggccatctagctggtcaagatatcgatcagctcgaacaaggggccagcgaacatacagcaaccgaagaaaccctacgtaaggaagatccaatcgactttgccctttggaagtcagaaaaagggaccgatattgcttgggattcaccttggggtaaggggcgaccaggctggcatatcgaatgttcagtcatgtcgaccaaatatttaggcgacacgattgatattcatggcggtggccaagatttagagttcccacatcatgaaaatgaaattgctcaaagtgaagcgaagactggtaaacatttcgtcaactattggttgcacaatggctttgtgacagtcggggatgatgatcaaaaaatgagtaagtctcttggcaacttcgtgacggtgcatgatttgattcaagaagttaatccacaagcattacgtttcttgatgagtagcacgcaatatcgccgaccaattcgctacagtgaatcattattagctgaagcgcaaacgaacctggatcgtttaaaaacggccctcgataacttagcgttccgccaagcgactgctgaagcgggcgcagacgcagacattgccgcacaagcggcaagcttggaagacgcctttgtgacagcgatggatgatgattttaacgtgcaaaacgggttaacagaattgtatgaactcgctaagcttagtaatcaatacctggaacgggctaccgtccaagctggtacgttagtggatttaactgcccgtctaacgcgcttgttagccatttttggtgttgagtttaaggcggcccaactgttggacgcagaggtcgaaagcttgattgaagaacgcaaagctgcacgggcagcaaaggattttgcccgcagtgatgcgattcgcgatcaattgaaagaacaagggattattttggaagatacaccacaaggaatgagatggagacgcgcatgaaaaatgctttacaactaaacgggattgcgttggcatatatgggcgattcagcctacgaagtgtatgtccgcgcccatttgctagaactcggtttaaccaaaccaacgcgcttgcaacaagtggcgacacattatgtgtcggctaaagcgcaagctgctttgattggtttgatgatcgatgataattatttaacagaagaagaaatgaatatttttaaacgcggtagaaatgccaaaagttatacgaaagccaagaatacgagtgtttcgacttatcggacctcaacgggctttgaagcagtttttggctatctatacttaactgaacaacaagagcgcgtcgctgaattagcccactggtgtattcaacaagtcgacgctgggaggacccatgagaaaaaataataaccaaccattcaaacaaaagaacaacgaattcaatagtcgtcggacggccaataattcggcaaagccaacgcgccgtccagctaacaagaaaccagcagcacccgtcgaagaagcagttgttgaagaacaaactgatttcgtcatcggaaaacatgcttctttagaaacattgaagaccagtgatgcgaagaaaatcaataaaattttcttacaagatggcttgaaggctgactttgtccacgatgttgtgaaattagcgaaagaaaaacgtctaatcattcaaaatgtgcctaaaaataagttggacttattgagtgaccgtcaaaatcaccaagggattatcttagcaatcgcaccgtttgaatatgcgagtgttgatgatattttcgctaaggccaaagcccgagaagaagaaccgtttatcttaatcttggataacttggaagatccccacaacttgggttcaatcatgcggacagctgatgcggttggtgtgcatgggattattattcctaagcatcgtgcggtggggttaacatcaacagttgctaagacatcgactggtgcgatcgaacatatcctagtggcgcgtgtcacgaacttaacacaagaaattaagaaattgaaggaccgtggtctttggatttttggcaccgatatggctggtaccgactatcgtaagtgggatgctaaaggaccaatcggcttaatcattggtaatgaaggcaaggggctttcaccaattgttaaaaaagaagttgatcaaacgttgacgattccaatggtcggtcatgtgcaaagtttaaatgcgagtgtcgctgcgggggttttaatgtatcaggcttataatagccgtcaacctttggtgtagcagatgaaaaaacagatcttaattgcagatggttataatatcattgggaactggcccgagctgaataagttgaaacaaaatgatcatctcgcggatgcgcgtgatcgcttattgcagatattatcagaatatcgcaagtttcgtgagattgaagtcatcttagtatttgatgcaatgtatgtgccagggattaaacaaagttatgtgcagtataatttggaagttgtcttcaccgatgaggatgaaacagcggacagttatatcgaaggcttagcgggtaaattaatgtcgccgattacgcaagtgacggtggtttcgagtgatcaagctgagcagtggacgattttttcacggggcgcattgcgggtgtcttcgcacgatttttatcgtgagattcgccgaacgcaccgtgaaattgaccatgatgccaagcattatcatgatcggaccttgcaacgggatatgccgtggaatccggcgcaactagatcaacttgcacaggtgcgagatgcactaagtgctgaaaaagatgattaaacaaacgttctcttaataaatgtacgataacttgttaagataaaggcgtggggttgcgtgagaggtggttcattgatggaattagcaaaacgtgatgcaaacttaattcaagcggtggttgaaaacgattctgaggcgttggatgttttatttaaagcctacctaccaatggtttatcgcacctttactccatattatattcgcttatttgatgaggacgattggttacaagaagcgcgaatcgtctgttatgagacttgccagtgttatgatcaaaattgcggcaaaagttttggtggtttttataaattacgctttcaccaccacgtattaaacttgattcgcaaagaacttgctcagaaacgacgggtcgatcagcaagccctgttatttgattgttgtccggaatgcaatgcgctcgctgaagataccgtggcatactatcagtcaacggttgaaatgcgggcgtacttagagacactatctgctttagagttagtggcctttcgggttttgacggggcaactagcagttgagcaagcgtgtagccagctagattgcacgtttgaacagatgaaacgggcacaatcgcgttgccagacaaaattaaaacgattctatactaaacaataaaatagctaaaagctgctaaccgacgatttttaggcattggttagcagttttttgtgtttagtagggagcataaaaaatacttttcatgcgataaaataacaggtgacaggttaatgattgggataggtcaacaaaatgggcggcttatatatttttaaataacattaattgacattaataaagaaagcgcttatactaaaaacatagaggaaatgaaaacgctttttataagccttttatcgctttctaaccaattaaaatttaaggggtaattcattatggcagaaaaaacaatcatgttatgttgtgcagcagggatgtcaacaagtttattagtttcaaagatgcaaaaggccgctgaagcacaaggtttagacgcagaaatttttgcaactggcgcttcagatgcagacaaccaactcgaatctaaaaaaattgactgcgtactattaggccctcaagttcgtttcatggaaggtcaatttaaagaaaaattggcaccaaaaggaatcggtgttgaagtaattgatatgaaggcttacggcatgatggacggcgaaactgtcttgaaacaagcgttagcattaatcggttaaaaaaagattaagaaaagcggtagcgacctatttttaggcggctaccgctttttttgtttatgaatcaggtataattaaggtaatcaagtataaaggagtttattcaatgagtttaattggtacattaatttggtggctattcgggggattagtagaggctatcggttggtttattctggggattgcctggagtattacgattattggaattccagtcgggctacaatgttttaagattggcgcattgaccttgatgccgtttaacgcaaccgttgtttcaacggggggtgcaggttcgtttttattaaacattgtttggtttttcttaggtggtcttgtgatgtgggcgagccatgtcttttgggggctattattatcaattacgattattgggattccatttggccggcaacactttaagctagcggcgttatcgttaagtccgttcggcaaacaaattaattaaaatgcaaaagggcaacgatattgatcgctacccttttttatgtggtgcaggcatatttctgtgcttagctacacaagtcaaacgattgcttgtagcaagcattcgccttgttaggctgatgctcgcagcataaccggctcttgacgcactctattgtgttagttcttctagtgccatcgcttgttcttcccagtctgattctgtttgagcgagttcagcttggactttttctaggtcttgttgtagttcttgaagcatgaggggtttagtaattacgtctgcttgggtcatttgttcttggattgcgttggccttagtctctagtgcggccattttttcttctaaagcagtaacttcgcgttctagtttccgttgtgcacgttggttttccttacttgctttgtaggcatcttgtgcattggcacttggttggataattgcactgttttggctagctgcttctgcgtaagctgtttcttcagctttcttggcgaggtagtaatcgtaatcaccgaggtatcgtttgctaccagtatctgatagttcgataatgccagtggcgacttgattgatgaaataccggtcatgggaaatgaagaggacggtgccatcgaattcacggagggctttttccaagacttccttgctatcaatgtccaaatggttcgttggttcatccatgattaagaaattgtcatggttcatcgcgagtttcgtcaagagtaagcgggctttttcaccaccactgagttgtgacacaacctttaaaacatcgtcaccggtgaataagaaactaccaagtagtgtgcgaatttccttttcaggtgttgtatggtgttcatcccataattcgttgaggacggttttgttagtgtgtaaattgcgttgttcttgatcgtagtagcccattgaaacgttactaccgactttttcatggcctttgatgaacggaatttggtgcaagatacttttgagaagggtcgatttaccaattccgttaggtccgatgatggctaagcgttcgtggcggttcacttcaaaattgattggttgtaccatgattttatcgggggaatagccgacagcggcatcgcttacttgcaatacttcgttaccgcttggatgttcgctttcgaaatgaaaatgaattttaccggcttcgttttgcggccggtctaatttatccatcttttcgagttgacggcggcgactttgggcttgtttcgtggtacttgcgcgcactaagtttttatcaacaaaggtctgaagtttatcgatttcagcttgttgtttttcataagccttccattcgagtgagaggttagcttcttttaaacttaagaaatggctgtaattgccggtataatgggtcaatgtgtggcgactcatgtcgtagacttctttagtgattttatctaagaagtaccggtcatgcgagacggtgagcaaggcaccgggataagtttgtaaataattttccaaccatgttagtgtttcgatatctaaatggttcgttggttcgtccaaaataaggacgtcttttttctcaagcaataacttagcaagtgcgagtcgcgagcgttcgcctcccgatagtgtactgattggctttttaaaggtgtcttctggaaattggaaaccatgtaagacgccacggatttcggcttcatagccgtaaccattagcttcagagaaatcgtgttggacttggtcatatcgttttagtaaggctgcatattcttcgctagcatggtcaatggttgtgtccgcaattgcggtctcgagttcatgcatttgggcttccatttggcggagatcatcgaaaatggttaacatctccgcatagattgtccgggttgagtctaagccactatcttgcgctaagtaaccgacttgagcatttttgctaagaatgatttggccttcatcaggcgttgtgatgccggcaatcatttttaataaggttgatttaccagccccgtttggaccaacgagggcaacacgggcgcggtcttgtacttcgagttgtgcgtttttgaaaaggtaatcgccgccaaaactgcgtgcgacttgttgaacttgtaataatatcacggctaaaaatcctttcgtgcggtgttttttaaagttaattacgttcatttttataatactactgtcaactatcataacagatttaaacgatggacagtcaaaattgtaaatatattgcttttcacaagaaaattcagtatgatttcagtatggtactacactattttcacaagcaaatcaaaaaggaggtttcaaatggttgagaataatatcccaagagcaactgcaaaacgattgcctttatattaccgctatttaaactttttgaacaattcagggaaaactaaaatttcctctactggattatctgaagcagttaaagtagatagtgcgacaattcgtcgtgatttttcatatttcggtgcactgggcaaacgtggttatggctatgatgtcgcttcgttgctagattttttcaagaagaccttgaaccaagatcgattgacaaacgttgcattgattggggtggggaatttaggccacgccttattgaactacaactttaagcaaaccaataatattcggattagcgcagcatttgatgttaaacccgaaatgattggaacaattcaaaccggtgttcctgtctattcaatggacgagatggccgaacaattgaagaaccaacagatcgagattgtcattttaacagtgccaattgatgaagctcaagaagtcaccgatgaattagtggccgctgggattaaagggattatgaactttacgccaattcgaatttctgtgccatcaaacgtgcggattcaaaatgttgatttggctaaagaactacaaactttgatttacttcctcgataattatactgatgaacaaaatcaagaataaaaatagcgtttaaacaagttgctcgtagtagccgcctgtttgaacgctttttttaacgattgagatacagtaaagtgacgatcaggttcatcccagcatggctgatgattgtggtgaaaatcgaacctgtcttgcggtacagccaacataggaaaagaccgatggccgtgtagattaacaaatgcccgtcctgatgtaaaaaagcaaacagtaaacttgaaatgatggcggctaaaatgcggtttaagcgactggctaatccaccaaagattgctttgcgaaacgtgatttcttccataatcggtgcggcgatggtcgttgctaaaataagaaacggttgttgttgcatcatggtcatcagtgaaatggtgttgagcgatttggcagtgatgtggagaatgttttgttcaatgaagccggcgagaatctgaattactaagaccagtacaatgccacacaacccccaaatgataatgggtttgagtgggaaaggccgctgctcaatggcattggcttgtgtgcgttgattaagatagagtaaccaggcggcaccgaggcaatcaacaatggttgtgattagaaaaaacgaggcagatagatgaccaaaacggacgactgcactaggaatcaataaaatgaacaaatagctaatgataattgaaaaattttgtttgtatagcgtcatgtgaaagctcctcaaaggttgttgtgacaatagcttagcgtattagcattcaaattgcaaaagtgctagcataatacttgcaatgttctgaaaaaatgctatgataaaaattgtgattagcacttgagatgatagagtgctaaaaaagtaaaattgatggagggattttaagtgttaaaaccattagaagatcgcgtgattatcgccgttaaagacgaagaagaacaaacagtaggtgggattgttttggcaagtaatgctaaacaaaaaccacaaaccggcaaagtagtcgcagttggtaccggcacattaacaagtgacggcaaacgaattccacttgatattaaagaaaacgatgaagttatttacgataaatatgcaggttcagaagttgaatatgaaggtcaacaatatttagtgctccatgctaaagatattatggctattgttgaataataataaacaaaaaaattttttgaggtgaataaattatggcaaaagaacttaaattttcagaagacgcacgttcaaaaatgttggcaggggttgaccaattagccaacacagtgaaaacaacattaggaccaaaaggccggaacgttgttttggaaaaagcttacggttcaccagaaattactaatgatggtgtgacaatcgctaaagcaatcgaattagaagatcattttgagaatatgggtgctaagttagtttctgaagtggcttcaaaaacgaatgacatcgctggtgatgggacaactactgctactgttttagctcaagcaattattcgtgaagggatgaagaacgtcacagccggcgctaacccagttgggattcgtcgtgggattgaattagcaactaaagaagctgttaagaagttacacgaaatttcacacaaagtcgaaagtaaagatgccattgcccaagtggctgctgtttcatcagctaacgaagaaactggtcgtttaattgctgatgcaatggaaaaagttggcaacgatggggtcatcacagttgaagaatcaaaagggattgatactgaattaagcgttgttgaagggatgcaattcgatcgtggttacttgtcacaatacatggtaacggataacgataagatggaagctgacctagataacccatatatcttaattacagataaaaagatttcaaatattcaagatgttttaccacttttacaatcaatcgtgcaagaaggtaaagccttgttaatcatcgctgatgatgttgatggcgaagcattaccaacacttgtcttgaacaagattcgtgggacattcaacgtggttgctgtaaaagcccctggttttggtgatcgtcgtaaggaacaattagaagatatcgccacattaacaggtgccacagtgattacaagtgacctcggtctagaattgaaagaaacaactatcgatcaattagggacagctggtaaggtaactgttacaaaagatgatacaacaatcgttgaaggtgctggtagcaaagatgccatcgctgaacgggttgaaaacatcaagaaacaaattgctgaaacaacatcagactttgaccgtgaaaaattacaagaacgcttggctaaattagctggtggcgttgcagtgattaaagtcggtgctgccacagaaacagaattgaaagaacaaaaatatcggattgaagatgctttgaacgcaacgcgtgcagctgttgaagaaggctacgttgccggcggtgggacagcattaatcgatgtgatcgaaagtgttgctgcgcttaaagaagaaggcgacgttcaaaccgggattaacattgtgcttcgtgcattggaagaacctgttcgtcaaatcgcaaccaacgctggtcttgaaggctcagtaattgttgaaaaagttaaatcacaaccagttgaagtcggctacaatgcagccaacggcaactgggaaaatatgattgaagccggcatcttagatccaactaaggtgacacgttcagcattacaaaatgcagctagtgtggcggccttaatgttaacaactgaagcagtggttgctgacaaaccagaagacaacccagcaccagcagcaggcatggacccatcagcaatgggcggtatgatgtaaagaagtgcgtttgaaacgggttggttctgagcattaacctaaaaacgagcgttatggcggtttttgccataacgctcgttttgtagttaagcggaagtcgttataaccaaaaagcacgattaaatccaaagttccaaaactggcaaaagttttggaacttttttatttttcaaaaaaaatgcgcatatataaattgtgcgcaaccctattaattaattttgattgcggtataataatagttggaggtgttgacaatgatttttcgaaaccggcggatactgataacctgtttaatgttaggtggcttctttttagcgcgaccacaaacggtccaagcaacgcctgaagaaatgcaaactgccattaagacagcacaagatcatctatccgaattgaataataatattagtaatttaacgttaaaaacaacgcaattgaacgaacaaatgactgcaaaacaggcggatattaaagaaaaacaagacgagttcagcaaaacatctgctgattatcaaaagcaagtggcgattattgaaggtaatctgcggcaattacaaacacgagatagcagttttaatcttgatatgatcgatagtttattgtcgagccaaagtttgagcgatttattccaaaaaggttcaatcatcaatcgactgttagacgctaaggcggataatgccgctgaaacggcctcattagctgaaaaaaagctgaacaaaagactgaattagaagcgcaacaggccaagctggtatcattatcacaggaaaatgatgctgcaattaaggacttagatcaacaaaaacaacaagctaacgaccaattaacgcaactacaaacgaagttcaagaaagaattagaggcgcaagcggctgctcaaaaagcggcgagtgatgcaggtgccgcattaattactggtaacaaggatttaatgaataataagattatccaagaagcggttaaatatttaggcgaccctatgtttggggtggcaccacacccgaaggatttgactgttctggcttagtgcaatacgtttacgctaaaaatgggattaaattaccccgtgtttcacaagatcaaagtaagttaggcaaagatgtaccgctcaatgaattacaaccaaacgacctattattctggggaggggttggaacagcccaccatgtcgcaatctacattggggatggatactttatccaagcaccacaacctggcgataaagttcgaattactaaaatttcagattacaaaccagattttgcccgtcgtttatcataaaaaataagaactgaccaaggaatcgaggcgtttcgattaccttggtcagttcttttttaaattgtggtagtaattcatgcgtaactatagtagaatacgatttgtttgaataaacggcaattatttttttaagttatagagaaattcaaaagtcactgtgtggattgcgacgaatgatattcacatgagggctttttatgttagaaatattatttaaaggggtcatattgctatgcaacagttaaaacggatttttatcgggaaaccgttaaaatcttccgatgagggtaatcaaaaattaggacgctttaaagcgttagcgatgctatcttctgatgcattgtcatcagtggcctacgggacagaagaaatcgtcatcgtattgacgaccctttcggccgcggcaatttggtattcaattccaatcgcagcctttgtgctcgtattgctattgtcattaactttgtcatatcgccaagtgatccacgcctatccaggtggtggtggcgcctacgttgtttccagtgaaaatttggggaaaaatgctggtttagtggcaggtggttcactgcttgtggattacatgttaaccgttgcggttagtatttccgcgggtgcggaagcgatcacctcggccattccggcattgtatgggcatcaagtagggatttccttcattatcgttttgatcttgatgggaatgaatctacgtgggatgcgtgaatcagcatcatttttaatggtgcccgtttacttattcgtcttgatgatgactttaatgatcatcgttgggtgttataagatcttcacaggtgcgattccgttccacgcaacatcaaccgttggggctgttgtaccaggtgtttcgatggcgttgatttttagagccttctcatcaggttcatcatcattaactggggttgaagccatcagtaatgcggtaccatttttcaagaagccacgtgcaacaaacgcggctgaaacattagcaatcatggcagccatcttaggtttcttctttgctgggattacatttttaaactactggtacggcattgtaccagcagaaaaagtaactgttctatcacaagtggcccaacacacctttgggaaaggctttttattctatattgtgcaatttgcaacggcctttattttagccgtcgctgcgaatactggattctccgcttttccagtgttagcgtataatttagccaaagacaaatatatgccacacatgtacatggatcgtggcgatcgtttaggttattcaaacgggattattacattggcgattggttcaatggcattgattttcatctttaacggggatacatcacgcttgattccactttatgcggttggtgtgttcattccatttacgctttctcaatctgggatgttgcgcaagtggtgggtcgaacgaccaaagaattggtttggtaaatcaattgccaattttgttggcgctttgatttcgtttgctatcttagtcattctcttcgtttatcgcttacctgatatctggccattcttcatcatcatgcctgttatgatttggattttctataagattcatgatcattacaagaaagtggcgcttcaactacgcgtgagtgctaaagaagccgtcttgcatgattatgacggttcaactgtgattgtcttggtcagcaacgtgacccaagtaacccgtggtgcgctagattacgcacaatcaatcggggattatgtgattgcgatgcatgtctcaacggatgaaaatccagccaaggaacgtgaaattcaagctgaattcaaggaagattttccgaatgtccggttcgtcgatgtccattcatcataccggtcaattcaaaaaccaattgttcgctttgttgacattgttagcaagaatgcgcaaaaacggaactttacaaccacggtcttggtcccacaattcgtaccaagaaaaccatggcaaaacattttgcataaccaatcaagtctaagactaagaacggcatttgcaaaccgcgaaaacattattatttcaacatatagttatcacttaaaacactagaagtgcgactcgatctgagtaggctttgaggattaacagtaaaatgggcattgtggcggttcttgccatgatgctcattttgcagttaaccggaaaagactgatcgaggagcgcgttaaagaaagaagtgcgtttagcaaccgagcattaatacaaaattggcagttatcccgagttgtgggatgactgccaattttagattaagcggaagttggtgcaactaaaagcacgttagaagagaagtgtgtttgaaacggtttgactttgagcattagcctaaatctgtgaatgagcgacggagttgatcgtttgcaaattgtagctaagcgcaagagtcagtttcaaaaagcacgttaaaagaagaagtgtgttcaaaccgattatgttctgaggattagcaaaattagacgaataagcgacgaagtcgattggttggctaattaggctaaacgcaggaacatggtttgaaaagcacattatcagccccgctcaccttttcggtgcgcggggctttttttgtttttctacgggtacagcaaaactttttattctgggcaaaaattgctacaatagaagctatatcaaagtctgagaaagaacattaaggggcgcaacatgcgaattttatttattggtgatacagtgggcacaatgggtcaaaaaatgatcaatgattacctaccagcattaaagcaacaatacaaaccacaggtgaccattatcaacggcgaaaacatcgcggatggtaaggggatgactcaaaaggattataagaatcttttacaagctggggccgatgcgattacgatgggcaatcatacttggaataagcgcgatattttagaattcatcgacgatgctaaaaaattagtgcggccggccaattttccgaaaggaacgcctgggcaagggatgacaatgattaacgtcaatcaagccaaattagccgtgattaacttacaagggcgcgccttgatgaatgaactactaattgatccgtttgaaatgttagatgaaatggtggctgaaattagtaaagaaaccaactgtatcttcgttgattttcatgccgaaacgacgagtgaaaaactcgcacttgcttggtatcttgatggccggatttcagcgttagttgggacccatacacatgtgcaaacaaacgatgcgcgcgtcttacctgaaggcacagccgttttaacggatgctgggatgactggcccttataacgggattctaggcgtgaagcgcgaaaagatcattaatcggtttaaaacacaacggccagaacggtttgaattagtgaccgaaggaccgggtcaattgaatggctgtttaattgaaattgatgacaaaacgggtcacgctaaatcaattaaaccgatccagatttcaccagatcacccctatacgcaattttaagcaccttagcagcagatcaacgtcaatgagagagggattaacaacatgccacaaaaaacgaaagaaacgccaatgatggcgcaatatcaaaaggtcaaggatcagtatccggacgcttttttattttatcgcctcggtgatttttacgaactctttaatgatgatgctgtcaaagcttcacaattattggaactcacactaacagcacgcaataaaaatgcggatgatccaattccaatgtgtggggtaccacaccacgcagcccaaaattacatcgatattctagtcgatcaaggttacaaggttgctatttgtgaacaaatggaagatcctaaaaccgctaaagggatggtcaagcgggaagtcattcaactggtcacaccaggaacgatgatggatgaaaaagccggccatgccaaacaaaataattacttaacagcagtggtggcagatggcgatcagtttggctttgcttataccgatttatcaactggtgagatgaaagtcagccagattgcgagtttggatttattgctcaacgaaatgttgagtttacaaaccaaagaagttgtcattaaccacggtgttgccagtgaggttgtgcacgcgtttgttcaacaacaaattctcgtgtcgtatcaagaagatggcgatgcaacggccgaagtcagtttcgtttcacaaaacatctcccagccccttgaactggccgtgattaaacaattggtcttgtatttggcaacgacgcaaaagcgccatttagggcatttacaacgggcccaagagtacgagccatcccaatatttaaaattagaccattctgcgaagatgaaccttgaattaacggcttctttacgcactggtcataagagcgggacattattgtggttattggatgaaaccaagacggcaatgggtggccggttattaaaacaatggttagaacggccattattggatttaaaggcgattcaaaaccggcaacgccaagtcgctagtttcatgaaccattattttgaacggacaaacttgcaagacgccctcacaaaagtgtatgacctagaacggctagcaggtcgggtcgcatttggcagtgttaatggccgcgatttaattcagttgaagacttccttggaacaaattccaacgattaaaacgattttaacgggcattaatgacgatcagacctttgaccgtgcgttagaccaactcgatccggttgatgatgtacgcgagctcattgaaacggccatcaatcccgatgcgccaatttcagtgactgacggtgggattattcaatcgggttacaacgaaacattagatgattatcgcgatgcgatgtctaacgggaaacaatggctagcacaacttgaagctaaagaacgcgaaattaccgggattcataatttaaaaattggctttaatcgcgtgtttggttactatatcgaagtgacacgtgcgaatttagacgcgctacctgaagggcgttatgaacggaaacaaaccttaaccaacgccgaacggttcattacaccggaattaaaggcgaaagaacaattgattttagaagccgaagaacgctcaaccgcgcttgaatatgagttattcacgcaagttcgcgaaaccgttaagttggagattgaacggcttcaaaccctcgctaaaagtgtggcggcccttgatgtcttacaaagttttgccgtagtcagtgaaaactaccactacgttcagccgacattaatgactgatagtcgcgaaattgatttagtggatgggcgtcatccagtggttgaaaaagtgctcggtcgccaaaaatacattcccaatgcggttcaaatgggcaccgatacggatatgctcttaattactggtccgaatatgtctgggaagagtacgtacatgcggcaactggctttgacggtcatcatggcgcagatgggatgttttgtaccggctaaatctgcgaacttaccgatttttgatcagatctttacgcgcattggtgcggccgatgatttaatttccggtcaaagtaccttcatggtcgaaatgatggaagccaatcgcgcgattatgaacgcgacacaaaatagcttgattctctttgacgaaatcggacgcggaacagccacctatgatggaatggccttggcccaagcgattattgaatacattcacgacaacgtgcatgccaagacactcttttcaacgcattatcacgaattgaccagcttagcggattcactaaccgcattgaaaaacgtccacgtcggggcagttgaagaaaatggcgagttagtctttttacacaagatgctggctggcccagctgataagtcatacgggattcacgtggctaaattagcggggatgccgacaccgttgttgaaccgcgcagatgtcatcttggatcaattagaagataaaccaaaggcagctgtcgcgccggctgctgaaccggttgaagaagtggatgaacaaatttcactattcgaaccagaagtggcaccacaagcggatccaaaagcagctaaagtcctagcggcggttaaacaattcgacttaatgagcgccacaccactagacgcgctaaacatgctatacaaatggcaaaaggaattaaacaaataagagtgcgtcatcaacgggtaacttctgagcatttacagcacttgacgaattggcgatgtaatcgccgatttggcaagtggggtaaagcggaagaagttgttgatgaaagcacgtttcggataagagtgtattcaagcttgtccaacttttgagcattagcacagggaagcgaattagcgacgcagtcgatgatttgattcacagcgctaagcgcagaaagttagcttgaaaagcacgttttagcactaaatacccacacgtcagaaaaaggagaacgctaatggggaaaattcatgaactgtcagaaatattaagtaaccaaattgcggcgggcgaagtaattgagcggccagcttcagttgtcaaagagttggcagaaaatgcgattgacgccaatagtactcaaattgacatcgtgattgaacaggctggtttgcaattgattcaagtcatcgataacggcgatgggattgaaccggaagatgtacccactgcatttaagcgacacgcgacaagtaagattgccacgcgccaggatcttttcaaaattcagtcacttggctttcggggtgaagcgttagccagtatcgcgtcagtgtccgatttgacgattgaaacggcaaccgctgattcgttagggacatttgctcattttaaaggtggcgtcttagaagaacagaaaactaatccaattcgccctgggacggcaatcacggttcgtgatttattcttcaacacgccagcccgcttgaaatatgtgaagacgttccagactgaattggcaaacgtgatcgatatcgtcaatcgcttggcgatgagtcatcctcagattgcgttcacgttaaccaatgatgatcacctgctgttaaaaacggcgggtaataacgatttacaacagacgattgccgggatctatggcgttacaatggctaagcaactcttgccagtcagtgcagaagatctcgattttaaattaaccggctatgtatcgctaccgaaactaacgcgggccagtcgtaattacatttcagtgttgattaatggtcgttatatcaagaattatcaattgaataaggcgattatcaagggttacggttcaaaattaatggtcggccgttatccagtcgtcgttttaaatattcaaatggatccactgttaatcgatgtcaatgtccatccgaccaagcaagaagtccgcttgagtaaggaacctgctttgatggcgttgattgaaaaagcaattcgtgagcgactcagcaccgagaatttaattcccgatgcagtgcagaatctaaaacaaacgaaaccggtcgatgtggaccagcttcaaatggatttaaaccaaattacgagtcaacggcgcaatgcgactggtacggtgcggccaattcagccccaaacagttcctgaaaagccggttaaaactgaaatgcaagcggcagcgcaaattgcggaaaccgaaacaccccttaaacgagaaccaactgctaatcctaatttaaatagcctgccgatatttgaacaaccccaacaattggcccggtgggatgataagtacgaagcagaggcgatcggaaatccgtttggtgaacaacctgaagatgatgcagcacccattgagcgtttcccagcgttacgctatattggacaactgcacaatacattcttattagcagaaggtgaagatggcttttacatcttagatcaacatgctgctcaagaacggattaagtatgaatactatcgcgaaaaaattggtgaagttagcaacgacgcccagaatttattggtgcctctcgtgttggaatatcccaatagtgatgcgattaagattcaagcacaaaaggaactccttgccgcagtgggtgtgcagctagagagcttcggccaaaatagttttgttatccatagtcatccgacgtggattgcgcaaggccaagaagaagcaacgattcgcgagatgattgacactgtattggaaaacgggaagttagacattgcccatttccgtgaaaaaacagcgattatgatcagctgtaaacagtcaatcaaggcgcaccatcacttagacgatgcgcaggctaaagcgttgttagtcgatttggcacagacggaaaatccgtttaactgtccacatggccggcccgttttaatccattacacgcaaaaagatttagaaaagatgtttaaacggattcaagatccacaccatagttgggagggcgaataatgtttatcttagcatcacaatcaccaagacgccgcgaacttttacaaaaagtcgtgcctgatttcgaggtacaacccgcaacaatcgatgaacgccaggtaccagtgacggcaccagctgactacgtgcagacgttggcgcaacttaagggtgaatccatcgcccaaaagaatccgcaggccactgtgctcagtgctgatactgttgtcagttttcagggcacgatttacggtaagccacatgatcgtcaagatgcagccgagatgttacggcaattgagtggcagcacgcatcaagcttatacaggtgtttggttatccattgatggtgaaatccgcaaaacggttgtccaaactgatgtcacgttctggccgttaagtcatgaaatgattgaaacgtatttagacaccgaagagtatcgggataaggctggtgcttatggtattcagggacagggaagtctgctcgttgagaaaatcaacggtgacttttacaatgttgttggcttgcccatcagtacggtggctcggttgttaaccgctaaggaggctgactaatggcaacgcaaaacattgccgtttattgcggcgctagtagtggtaataaaataatctacacggaagcggctaaggcgttgggcacttggattgctgagcgcaaagcgcgcttgatttatggtggcgcccaagttggtttaatgggcaccgtggccgatacggtgttggcccatgatggacaagtgatcggcgtcatgccagggtttatgagtcagcaagaactcgtccatccaggtttaaccgaaatgattaaggttgatacgatgtcagcgcgtaaagccaagatgattgaactggcagatgtgtttatcgcattgccgggtggtcccggtacgctggaagaaatgagtgaagttatttcatgggcgcgaattgggcaacaaaatggtccctgcattttttataatgtcgcaggctattatgatttgttacaacaatttttagcccacatggtcagtgaaggttttttaacacaggtcgattttgaaaaatacttatttaccgattcgttcagtgtgatggcatcctttatcaaggattaccaaccgccgaagattcgtgaatactaattgctagggtttgagttggccgtgggtcacttaggcccttcttttacgctttttggctgctggctgtttcacgattcggattttatgttacaatttaacaagcaaatatacgttctcgtaaagtaggtaaatttatgtatgaatatttaaaaggtttggtgacggcggttagtccgtactatgtcgtcttagaagttcaaggcgtcggctatcaattgcaagttgctaatccgtatcgttacaccgaatcaacgaccgatatcgttcagatttatgtctatcaagcggttcgtgatacggatatcacgttatttggtttttacgatctagatgaaaagcaaattttccaaaaattaatcagtgtttctggaattggtcctaagagtgccttggccatcttagccaatagcgatcattctgggttaatccaagcgattatgaatgatgatgtgagctatttgaccaagttcccgggggttggcaagaagactgcccaacaaattgtcttagatttaaagggcaagctcggtgatttggaacaaaccgaaacgctcgctggtcaaacggctatcgatcttggtacgcctggtgaatcaccagaattaaacgatgcgttagcggcgttaaccgcgcttggatattcagcccgcgaagtcaaagcgattaccaaaacactggctgatttcaatgcacaaactacggatcagtacttacgtgaaggtttacgcttattaatgaagaaataaaggaggactaatggatggcagaagaacgaattgtttccgcagaaaacgaagatttcgcagaaacaagtattgaaaagacgttacggccacaagtcctcgcgcaatatatcggtcaagaccgggtcaaaaatgagttggcggtttatattgaagccgctaaaaagcgggaagagtcgttggaccatgtgctattatatggcccgcctggtttaggtaagacgaccttggcgatggtgattgccaatgaactgcatgttcagattcggacgacgagtgggccagcaattgaacggcctggcgatttagtcgcattgttgaacgagttacaacctggtgatgtactatttatcgatgaaattcatcgcttgccgaaagtggtcgaagaactactttattcggcgatggaagatttctacatcgatatcgtggtcggacaagggccaactgcgcacccggtgcattttccattgccaccgtttaccttgattggcgcaacgactcgggccggtttattgtcggcaccgttacgtgatcgtttcggaatcgtcgaacatatggcatactatgatgaagatgatttggtcgatatcgttgaacgctcggcagatgtctttaacatggccattgtccaagaaggcgcgcatgagattgcccgtcgttcgcgggggacgccgcggattgcgaaccgcttattaaaacggattcgcgattacgctcaagtggcggaccaagcggcaattgatcaagcgattgccgaccatgcgcttagtcaactacaagtcgatgtacgtggcttagatagtattgaccgcaagattctccagatgatgattgactattatcatggcggtccagtcggtctaaagacgattgcggctaatattggtgaagaaaatgaaacaatcgaagccgtttacgaaccgtatttgttacagattgggttcttaaaacggacaccgcggggacgtgttgtgacgcccgctggttatgaacatctcggtattccctattcagaaaattagaaagaggttacacaatggtttcaacagaagattttgattataatttaccagaagaattaattgctcaaacaccgatgattgaacgggcagcgtctcgtttattggtgatggatcacaaaacaggcgcactagaagataaagttttctacgacattatcgatgaattaaatcccggcgatgcagttgtcatgaacaatacgcgggtcttgccagcacgtttatatggtgtgaaacctgatacgggcggccacgaagaagtcttgcttttaaacaacacgcatgacgatgaatgggaagtcttgatgaagccagcacgccgggccaaagttggtaccgaagtcgtttttggcgatggtcaattaaaagcagttgtgaccaaggaactcgaacatggtggccgcatgattgaattcaagtatgacggcatcttcatgcaaattctagaagctttaggtgaaatgccattaccaccatacatcaaagaaaaattagatgatccagaaatgtatcaaacggtttatgctaaagaacctggttcagctgccgcaccaactgctggcttccactggacagaagaactcttgcaaaaagtgcaggataaaggcatcaaacttgtgtacttaacgttgcatgttggtttgggaactttccgacctgtttcagaagacaacgtggaagatcacaaaatgcacagcgaattctaccgattaacagaagaagctgctgcaacgttgaatgaagtcaaacaaaatggtggccgcattgtggcaacggggacaaccagcattcggacgctagaaacaattgcgacgaagtttgatggtgaactcaaagctgatagtggctggacatcaatctttatcaaacctggttatcaatggaaagctgttgatgcattcatcacgaacttccatttaccaaaatcaaccttagtgatgttggtcgcttcatttaccggtcgcgaaaacatcttaaatgcttatcaacacgctgttgatgaacggtatcgtttctttagcttcggcgatgccatgtttgttaaataattcgacaaaaatgaggtggcagcattgatgtatttgagaaaagcaacgtttacagatttaccgcggattttagagattatcgaacatgcaaaggccgccttaaagaatcgccagataaatcaatggcaagcaggtgaacctaatcaaactcagtttgaagacgagattcaccaagaattatgttacattctgatggctgaccaacaggtgattggggttgcctcaattctagcaactgaagatcctggctatgcagcaattaccaatggtcaatggcaatctggttcgacaccttatttttcaattcaccgcgtcgcactcgatagtgccttccacggccaacatctcgggacacagtttttaaccttattggtgaccgctgccagtttacgaggcgcacatgatttacgcatcgatacgcaccctgataacttggcgatgcaacatatgattcaaaaagtaggctttcaatatcgtggtgacatcttcattgcaaacgatccgtcaccgaaacgctatgcgtaccaattattactgaaccaacaataatcctagaattggagtcgattaaatggaaccagcgatcaagtatcgtctaatcaagaaagaaaaacataccggggcgcgccttggtgaaattgtgacaccacatggcacgtttaaaacacccatgtttatgcctgttgggacccaagccagtgttaagacaatggcgcctgaagaattaaaagaaatgggtgccggcattattttatcgaacacctatcatctctggttacgacctggggaagacatcgttgaaaaagccggtggtcttcataagttcatgaactgggaccgcggtgtgttaaccgattctggtggtttccaagtgttctcacttgcgaaattacgggatatcagtgaagaaggggttgctttcaagagtcatttgagcggcgaaaaactgttcttatcaccggaaaaagcaatccaagtcgaaaatgctttgggtgccgatatcatgatgagtttcgatgaatgtccaccattctttgaaagttatgactacgttaaaaaatcagttgaacggacatcacgttgggctgaacggggcttgattgcgcatcaaaacccagcaacgcaaggtctatttgggattgtccaaggggccggctttgaagacttacgccgccaaagtgcgcgcgatttagttgggatggacttccccggttattcaatcggtggcttatcagttggtgaatcaaaaggcgaaatgaatcgcgtgcttgatttcacaacaccaatgttacctgaagacaaaccacggtacttgatgggcgtcggttcgcctgatgccttaatcgatggtgtgattcgcggtgtcgatatgttcgattgcgtgttgccaacccggattgcccgtaatgggacaacgatgacctcacaaggccgattagtggttaagaatgcgaagtactcagaagacttccgcccattggatcctaagtgtgattgttatgtctgcaagaactacacccgcgcttacattcggcacttgattaaagcggacgaaacgtttgggattcatttgacgagttaccataacttatacttcttgattaatttgatgcatcaagtgcaagatgccatcgaacaagataatttattggaattcagagaagcgttcttcgaagaatatggttacaatgaaaagaacactcggaatttctagtgaatcactggaagttgcttgataagtctgatagagttagtaatagacaaaattgaaaagaggttttttaaatggcaaactttgtgttaggtgccggcggttttaatcccagtttcttcgttatcttaattttaatgatggcaatgatgtatttcatggtaatgcgcccacaaaagaaacaacaacaaaaacaccaagaaatggtgaaccaaatgaaaaaaggcgacgcagtcatcacaatcggtggtttacacggtgtgattgattctgttaatacagatactaaaatcgttgtcttagattgtgacggcgtttacctcaagtttaacttgagcgcaatccggacagtaacaccaactgcttcagaagccgcaacagtggttgaagaagaaacggttgaagaaacaaaagaagatacaaaataattcagagagcgctcgattgaatacttcaaccgagcgcttttttatttgcattatatagtaaatttattatcaaatgtaggcttttaaaagataaatcgcctttaactaagaaataaaatttgtaattataatcacaaaacagtttacaaacaactcaaaatgcgctaaactaactttgttaaataaatcacaatagttaattggcatggagggaatcgatatggttaagaaagcagcagttgaaacggttgaaaacacagtgaatgaaatggtcaccgatttagtgacgcgtgcacaacgggcattagcaattttggaaacattcgatcaagccaagattgataatattgtccatcaaatggcgattgctgggttagaccaacatatggcactcgctaagatggcggttgaagaaactggccgtgggatttatgaagataaagccatcaagaatatttttgcaaccgaggaaatttggaatgcgattaaagacaataaaacagttggtgtgattgaagaagatccagaacatggcatcactaagattgcagaacccgttggtgtcattgctggtgtaacaccagtcacgaatccaacctcgacgacgatttttaaagctgagatcgcgattaaaacgcggaatccaatcatctttgctttccatcctagtgcgcaacgttgttcggctgaagcattgaatgtcattaaagctgcagcggttaaagccggtatgccagcagatgcactcttatatatcgaagaaccaagtattgcagctacccaggctttaatgaaccatgaaggggtcgcaactgttttagcaactggtggtcctgggatggtgaaagccgcttattcaactggtaaacccgcactgggggttggggctgggaatgcgccagcgtatatcgaagcttcggcgaacatcaaacaagccgtcaatgatttaatcctctcgaaatcatttgataacgggatgatttgtgcttctgaacaagccgtaattgttgatgctgaaatttatacggcagtgaagaaggaattccaagcacaaggggtttacttcgctaaaccaagcgaattatcagcactcaatgacgcagtaatcgacccagataagaatgcggtccgaccttcaattccaggccaatctgctgctaaaattgccaaactagctgggatcgatattccagaagatacgccagttttaattgctgaaattaaaggtgttggacaccaatatccactctcacatgaaaaattatcacccgtacttgcgatgattaaagctaaagatcgcgaagatggcttgcaactctgtgaagcaatgctagatcttggtggtcttgggcatacggcttcgttgcatacaacggatgaagctttaccactcgaatttgcaaaacggatgaaagcatgccgggtcttagtgaatacaccatcagcacaaggtgggattggtgatttatacaatgacatgttaccatcattaaccttaggctgtgggtcatacggccataactcaatctcccacaacgtttcaacgatcgatttgttgaacgtgaagacgctaaccaagcgccggaataacatgcaatgggtgaagttgcccagcaaaatctattttgaaaaaaattcagtcaactatttagaaaaaatggcggacttgcataaggtttttatcgtcgctgatcaagggatggtcgacttaggttacgtgcaaattgttgaagacgtcttggcgcgccgcacagatcaagtgcaggtccaagtatttgccgatgtcgagccagatccatcaaccgataccatttataaaggcgccgaagtgatgaaacgcttcaaacccgatacaattgttgctattggtgggggctcagtcatggatgcggccaaagggatgtggttattctatgattcagaagatgccgacttctttggcgctaagcaaaaattcttagatattcggaaacggacttacaagttcccaaacctcgatcggacgaaactaatctgtatcccaaccacttctggaacgggttctgaagtaacgccgtttgcggtcattactgatagtgaaacgcacatcaaatatccattggcagattatgcgttaacaccagatgtggcaattgtggatagtcaattcatcgaaagtgtgccaccccgcgtggttgcgcatactgggatggacgttttatgccacgcgactgaaagttacgtatcagcgatggcgtcaaattatacaaaagggctcagtttgcaagccattaaattagtgtttgataacttacaagcgagttatgcgggcgataagacagctaaagccaatatgcatgatgcgtcaacaatggcgggaatggcgtttgccaatgcgctattaggtatcaaccattcactggcgcacaaactgggcggcgcgttcaatttgccgcacggattgatgattgccattacaatgccgcatgtcattcgctataatgctaagacaccaacgaaacgggcactctgggctaaatacagttacttcagagcagatgaagattatgctgaaattgcacgttatctcggtttaccaggtaaaacgactgaagaactggtggccgcttacgcagatgctgtgactgcattggcggaaagtatcggcatcaagatgcgtttacgtgataatggcgtgacaaaggccgactttgatcgccacgttgatgatttagcagaactggcatatgaagataactgtacggtaaccaatccaaaagaaccattaattaaagaattgaaagggattctcgaagcagaattctagcaaattgaccaagtgatttgctagaataagtggtttgagaagcccgaccacaaatttaaggcggtagactgaaacaaatcggtctaccgcctttttttgttgctgaaaagagattaattttttactatttaagggactaaattgaagcttaatggtatgaaaattattacaaataaggcataatagaaagtagacattcatttagttcagggataactaagaaaagtttgtcgacaaacttgattaaggatctggatggcaatgacacccaataaagaagactatttaaaaattatttttgaacttggtggcgacgcaaagaaagttaccaataaggaaatactagcgggattgaacgtttcggcggcatcagtcacggaaatggtcaataagttagtgaaggaaaactacgtcaaccacacaccttaccaaggaattcaactaacaagtgaaggcgcccgcgaagcagccctattagtgcgcaatcatcggttatgggaagtttttttagtcgacaagttacattatcaattcaatacggtgcacccagaagcagaacaactcgaacatgttactaatcacgacttggctgaacggttagctgatttcttggggcatccaacgcgttgcccgcatggtgggattatacccaatgccaagggggaattcgaacaacaaagtcacatcgcacttgaaacattacaagtgggtgaaacggcgattatcgatcgcgtattggatgataatgacttattaaaatatacactggaaatcggcttgtcagtcggtgacagtgtgacactcaaaaaggttggcctcttcgaaagtccgttgactgtttttaataatacgagtcaaacagaaatccaaatcggcctcaaagcggcacaacacatctttgtgacgccacaaaattaatttatatgaaagtggtgtgagatatgcacacagatttagcagcactctttattatttttggtggttccggggacttagcccaacggaaattataccccgcattatttaatttataccggaagggttatttaaaagaacacttcgctgtcattggaacagcacggcggccatggacggatgatcattatcacgaaatcgtcatgacagctttggacaactttgatgaagatcaagcaactaaagaagctttcgtaggtcatttctattatcaatcacatgatgtgacggacgccaagcactacgaaacattaaaggctttagcaagtcagttggatgaacaatacgaattacaccaaaatcggatttattacatggccatgtcaccacggttcttcgggacaatcgcaagtcatctcggatcagaagcgctcctaacggcggatggctttaaccggttgattatcgaaaaaccatttggtcgcgattatgaaagtgctaaggcgcttaaccaagaattgacgcaaacctttgatgaagaccaaatctaccggattgatcactaccttggtaaagagatgattcaaaatatcgttgctttgcgttttgggaacggtctattgagtggtgtatggaataatcaattcattgataacgtccaaattacgttggctgaatcagtaggggttgaagaacgcgctggctattacgaaacatcgggggccttgcgcgatatgttccaaaaccatatcatgcaagtgatcggaatgcttgcaatggaagtgccggttaactttacggcagaagatgtgcaacgtgaaaaaacacgtcttttcagaagtattcaaccttactcaccagcagaaatcaaacaaaactttgtgcgcgcccaatatgctgaaacatcggtggatggcgaaaacaaaccggggtatcaacaagaaaccaacgttgcgcctgattcacaaaccgaaacatttgtcgctgggaaagtgatgattgataacgaacggtggtgtggcgtaccattttacgtccggaccggtaaacgattggcacgtaaagaaacgcaaatcaatatcgtcttcaagaagactggcgtcaatatttttgctgatgataagtcagatcgttcagcaatggcacctgatgtcttaacaatctatgtcgaaccggaacaaggcttttcattaacgattaatggtaaagaagtcggtcaaggattcgccttgaaacctgatcaattggcttaccaatatgatgaacagatgttggctgacagtccagaagcttatgaacgtttgattttagaagcgctcaatggggatggcacgaacttcacacattggcatgaattagccgcttcatggcaatttgtcgatgcgattcgtgaagtctgggatgcggatcaaacgccactaccaggttactcaatcggttcaatggggcctaaagaagcaacagatttactggcaacaacaggggccgaatggatttttgatcccactcaaaataattaaattaaacaagtcagcaaagtctgtgtatgagatgctcatgccaggcttttcttattgaaagaagtacgtcatcaacgggtaacttctgagcatttacagcacttgacgaattggcgacggaatcgccgatttggcaagtgaggtaaagcggaagaagttgttgataaaagcacgttaaaggaagaagtgcgttaattcgcggttagcctttgagcatttgcctaatcagacggataagcgccaagggcgattatttggctgatgtagcaaagcacagaaggttacgaattaaaagcacgttaaagaaagaagtgcgtcaaaagcggaacaatgtgcctgaaaaagcatgttgaaaaaattaaggaggggtaacatggcagagctgttcaagattccattagaaaatgatacgagtcgcaaaatcattcacattgatatggacgcgttttacgcatcgattgaagagcgtgaacagcccgacttacgccaaaagcccctcgtgattgcccgtaatccgagtgatactggtggcaaaggggtcgtgacgaccgcgaactatgttgcccgacaatacggtgtgcactcggcgatgagtgcacaaaaagcagctgaactgattccgaatcaccaagccgtttttaaggcgcccaattttccgctttatcaatcggtctcggaacagattcacacgatttttcatacggtaaccgataagattgaaccgattgcttttgatgaagcgtaccttgatgtcacggaaaataaactcggcttggcacacacaattgatgtggtcgcctacattcaaaaagaaatccttaaagaaacccaactcgtcagctcggcggggatttcgtacaataaatttttagcaaagatggcatcggattaccgcaagccagcggggcggacactcgttttgccggaacaagcgattgcctttttaagtcgcttgccaattgaaaaattccgtggggtcggtaagaaaacggcgccgcgaatgcaagaactcgggattttaacgggggcggacttgcttgaacaatcagaaatgatgctgatgcaaaatttcggcaagcttggctacggcttatatcggcacgtgcgcggcatcgataatcgcccggtcgcctaccaacgtgaacgcaaatcaattggcaatgagaatacttacgggcaacccctaatcagtgaagagcaggtgcaagttgagttgaagaagttagcgattgaacttgaacggcgtttacgcaagaatcaaaaacacggtttgacagttgttttaaaagtgcggaatcgccaatttgaaactattactaagcgtaaaacatttaacgaatatgtcggcaaggcagctgaactcgaggcgatcgcttgggaaatttggcaaaccatcggccatgcagaagatggcgtgcgcttgctcgggattacggtgactaacttggcaccgcaaacatttgaaaacatcacgttaccgttatacgattgggagcgtgaatagttgagtttcctttgtttttgtgcgctaaaaccgatatactattaataactatgtaaatctgataaagggtggtggcgttgagtggcaactaagcatgatcaaattttaatgtacatcgaaaatttaccaattggtgacaagatttcggtgcgctcaattgccaaaacactctcggtaagtgaaggaacggcttatcgcgcaattaaagcggcagaaaataacggcctggtcagcacaattgaacgggtcggtaccatccgcattgaacagaagttaaaggggaagattgaaaatctgacctttgaagaaatcgttcaagtgattgacggcgaggtccttggtggccgcgctggtttagacaagttgttggacaaatttgtgattggcgcgatgcaaatcgatgccatcacgcgctacattacgccaaagtcattgatgattgttggtgatcggacggatgtgcaacgcttagcacttgaaaacggggccgctgttttgattaccggcggttttggcacttcggcggacgtcattgcattggccaacgacttggctttaccgattttgcaaactgcctacgatacctattcggtggcggcattgattaatcgggcgttgaccgatcaattgattaaaaaagaaatcataacggtggctgatatctaccacccacttgctgaaatccacacgttacatgctaatcaaacggtagccgactacaagcaattgagtgcggcggtaaaacaatcgcgttttccagtcgtcaacgaacatatgcgcctcgttgggattgtgacggtgaaggatattttagataaaccggccacgatgaccttggataaagtcatgaccaaggaacccgcgagcgttaaaaaatacatgagtgttgccagtgtcggccattcaatgacttggaatagtttagaagtgatgccagtggtggcggacaatttagaactagaagggttaattacccggcaagatgtcatgagcaacatgcaaacggcgcaacgccaaccgcaagtcgccgagacgttttatgatcagattgtcgaaccactgcgtcctagtgaaactgtcccagacttttatacggcggcatatgaatatgaagtgacgccccagatgacgaataacttagggacaatttcgtttggtgtactgaccgaagcggtttcggcagcttgtcaacaaatgctccagacgcaacatcagcgctattcaatgattgaacagatcaacctccattatttacggttgattcaaatcgacacgcagattcagattttaccacgcttgctcgaaattggacggcgttcagctaaaatcgatgtcgatgtttacgccaatcatgtgattgtggctaaggccctcgtcactggtcaactcttagaaagaggttaataaatgacaactccagaacaaattattgctaaaattgaaacttacgatacgattatcatccatcgtcatgtcaatcctgatcctgatgcgattggctcacaagttggcttagctgaagtactgcgtaacagctacccagacaagacgatttaccaagtcgggagcgacaccggtaacttggcatggctcgcaaacgttcaagaaattgaaccggctgcttatcaaggtgcattagtgattgtgactgatacagccaactcacctcggattagtggtgagacgtttaacttaggcgctgaattaatcaaaattgatcatcatcccaacgatgatccttatggggatttaaactgggtgttacctgatgcctcaagtacctcagaaatcattattgacatcgtcaataacagcgaaggccacttacaattcaatcaagcagctgcgcgtgttttatatgccgggattgttggtgatacggggcgcttcatgtttaattcaaccagtccacataccatggaatgtgccgcccaaatgatgacgtttgatattcaccatgataagctcaatcaaaagatgaacgaaatcacgttggaacaagccaaattacaagggtacttattcgatcaacttcaagtgaacgaccaacaagtcgcctacttagtggttgatcgcgcaacccaggaccggttacatgttgaaccgcaacaagtacactcgattgttggaacacccggtcgtttgaaaggggtattaacgtgggtcatcttcgtgcaacaagcagatgacacttaccgcgtgcatttccgctcaaagggcccaatcattaatgaactagcgaagcaacatgatggcggtggtcatccactcgctagtggcgctaaggcagctgatcaagctgaaatcgacataattattgcagaattatcagcgctagccgcgcagtacactgaatagacgcagatccagatttaccggattcaaacaatagaaagcaggactttatggataatcaatttacacaatttaatctaaaacccgaaatcattgcggctttagacgacatgcactttacaaaacccacggcggttcaacggcgtgtgattccagccatcaacgctggtaaaagtgttatcggtcaatcacaaacggggagtgggaaaacccacgcgttcttattaccccttttaaataaactggtgcctgaaaaagacgaagttcaaatcgtcatcacagccccaagtcgcgaattggcttaccaaatctatacggctgccgaattaatcactcaacacatgacgggggatattcggattggtcgttatgttggtgggactgacaagcaacgccaaatcgaaaaactcgaacaacatcaaccacagattgtgattgggactcctggtcgaattttagatttaatcaagagcaaggcgcttaagatttatacagcgaagatcttggtcatcgatgaagcggatatgacacttgacatgggctttttgaagccagttgatgacatcgctagtcgtttgccagaagacttacaaatgatggtcttctcagcaaccattcctgataagttacaacccttcttacaaaaatacatgcacaatcctgtgattgaagaagttaaaaacgaaactgtgattagcccaacaatcgacaactggttagtgccaacgaaggggaaagccctcaaccaaaccatttattcattattgacgatgggccatcctttcatggtcttggttttcgctaatacgaagagcaaggttgatgacatccaccgttatttacaatcacaaggcttgaaagtcgctaaaattcatggcgatattccaccacgccaacgtaaacggattatgaaagaaattcataacttagactatcaatatgttgtggcaactgatttagcggcccgcggtattgatatcgaagggattagcatggtcattaatgctgaagtcccacgtgaagatttagaattcttcattcaccgggttggtcggactggtcggaatggtcttaaaggaaccgcgattacgctttatggtccagatgatgaacaagccgttgcacaaattgaagcaatgggcatcaagttcacaccaaagacatttaaagatggcgaattggtcacatcatatgatcggaaccgtcgtaaaaaacgggtagctaccacgcatgaattagatgtcggcatgaaagggatggtcaaaaaggccaaacttaaacgcaaacccggttataagaaaaagattaaagcagccattaaacaagatgcacaaaagaaacgccggattgaacaacgacttgaattacgtgaaaagaaacgtcaaaacaagaagcaaaatagctagttaattcataatcgaggtggctgtgatgcatgaaaatgacttacaattactgaactggttatcgttatccgaagaagcacggcgcgctaattttggccaggtgttgcgctactttgttagcccgctgattccaattgaagcgattcagagtgagaccgcaacgattggcactcaagtatttcaaacttacagtgcccggctagctgggcagcagtttatttttatccccggccaagctaatgtgcagttgggatggcaagcaggggcagcccacttagcaccgagtgagtggtttgcacaaactaaacgtacgttaccagttgatcaaggactcgtttgggcgacgcaagcggatgtcgatcaatacgttgatcagatgacatcagaatatcggattgttaatatggcaccgatgttagtggcacaaacaccaatttcaagtgagtgggtactccaaggcgagtatgaaacgacaacaggacgttttaatggaaaccaactagttgggcgtcagtttttggcggaaatccaaaataccttgtttcgggcgcggcgggaacaaaattcagctgaaacacttgaaagtgcgcacctaattttacaagcgggtgggcgaccagattgttaccaagtgtttgaaaaaactaatggtgacgaaagtgaactacgccagacattgcggcggcgcggttttgatctggtgagtgttgatcagtatgaatggcttaaaggtgcagggagtaagacgttgtggttaagtggtaatcacttaccacgaccgactcagcgccagcagatgccatttgggttacaagcaacagccgctgacggttatgaacttactcaagatccacttgtttataagggtggtgcttgtgtgacagggggacggtatagtttggaacaatggttgcctgaagcacccgcctatgaatctgggattcaaacggcggcattgggcaatccgacgtttcagtgctactatcggcctgcgattaccgttaccttggattagttgacaattcagcaaatcttttttatactttggaagtgttgggatatacgcaacgaactgacggagacaggaacgcctttctagactgagagaaggtgccgccattggttgacgtgctccccaacatcacaaacaattcaataaactcataaagaggttaacgactaacatcgttgcaatcaaggtggtaccgcgcttttgcgtccttgaaattgcagcggtgttttatttttttgaaggagcaaacatgatgaaaaaactaaccagtgcgcaagtgcgccaaatgttcttagatttctttaaagaaaagggtcatgatgtcgaaccaagtgcatcgcttgtcccagatgatgatccgacattattatggattaactcaggggttgcgaccctaaagaagtatttcgatggtcgcgttgtacctaataatccacggattaccaatgcacaaaagagtattcggaccaacgatattgaaaatgttgggaagactgctcgtcaccatactttcttcgaaatgctcggcaacttttctgtcggggactatttcaaagaagatgcgattccatgggcttgggaattcttaaccagcgacaagtggattggtttcgatcctgaaaaattatacgtgacggtttatcctaaagatcaagatgcgcaccggatttggcatgaaaaagtcggtttgccagaatcacacatcattgaagttgaagataatttctgggatatcggtgaaggcccctgtggccccgattcagaaattttctatgatcgtggtcaaagcttcaacaacgttagcgaagatgatcctgaaaactatcctggtggcgaaaacgaacgttatctggaagtttggaacatcgtgttctcagaattcaaccatttaccaaacggcgaatatgttgaacaaccccacaagaacattgatacggggatgggcctcgaacgacttgtttcagtgattcaagaagccccaaccaactttgaaacagatttattcatgccattgatcgaagcgacagctaagatgagtgaccacaaacaatacggtcaaaatgcagctgatgatatttcattcaagattatcgcagatcatgcgcgggctgtgacgtttgcaattggtgacggtgcaatgccggccaatgaaggtcgcggctatgtactccgccgtttaattcgtcgggccatcttaaatggtaagaaactcggcatcaacgacgctttcatgtacaagttagtaccaatcgttggtgaaatcatgcaaagctattacccagacgtattagcacaaaaagaattcatcgaaaaagtcatccgttctgaagaagatcgtttccgtgaaaccttgaatgatggtttacgtttattgaaccaaacgattgacagtgtcaaagctgctggtcaaagtgaaattgctggggcagatgctttcaagttatttgatacgtatggtttcccaatcgaattgacaactgaatatgccgaagatgaaggcttaacagttgatcaagctggtttcgaaagtgaaatggcacaacaaaaatcacgtgcacgtaatgcccgtagtgatgaacaatcaatggggatgcaaaacgaacttttaatggatatcaaagtggaaagtaccttcactggttatacaacgcttgaaacagaaagtaagttaagcgtcatcttacaagataatgccgaacaacaaacgattaagagtggtacggcgcaattaatcttcgaccaaacaccattctatgctgaaatggggggccaagttgctgatcaagggatcattaagaacctagctgggcaagtagtcgctaaagtgactgacgtgcaatacgcaccaaacgggcaaccattacacaccgttgaagtgctcgaagaaatgattagtggtgtccactatgtcttatcagttgatccaaccttccgcggtggcgtcattaagaatcacaccgcaacgcatttattggatcaagccttgcgtgatgttttaggcgaacatacgcatcaagctggttcattggttgaacctgactacttacggtttgattttacgaacctcggtcaagtcacaccagatcaattagccactgtggaaaaaattgtgaacgaaaaaatttgggctgcactacctgtgaatactgttgaaaccgatattgaaacagctaaacaaatgggggccatcgcactctttaccgaaaaatatggtaagacagtccgagtggttcaaatcggtgattactcaatggaactttgtggtgggacgcatgctgctaacactgctgatcttggtctattcaagattacgagcgaatctgggattggtgccgggacgcgccggattgaagccgtgacttcaaaggcagccttcaagtatttgaatgacaaacaagccttattaaatgaattagctggtgaattgaaagttgctcaaaccaaggatttacctaagaagattcaacaattacaatctgacttaaaagcagaacaaaaagaaaacgaacaactcaaagcaaaatttgcccaacaacaagctggcaatgtttttgaaaatgtcgaaacagttggtcaatggcgcttagtggctgctgatgcaaaagttgccggaatgaacgaattacgacaattagcggatcaatggcaacaaaaacaaatttcagatgtcttagtgctcgcaacagttgcgggagataaggttagcttgattgtcgcggtcgcacctgatgcgattaaagcggggattaaagccggtgatttgattaaacaaatcgcaccactcgttggtggtggcggtggtggccgtccagatatggcccaagctggtgggaagaatccagctgggatcgcagatgctttggcagctgctaaaacagctttagcgaacgcttaacttataacgggattgtcgtcaattttttattgattgcaatcccgttatttttttgttctttttgttaatcaatttagcgaaatgtgttatagttatctctcatccgcattctgctaagagaggggagagttgtactttgtcctgttttcgagtagaatatggttgtataagtagcgaaaagttgaggtgttgagagatgaatctagataaaacagtccattttgattttggtaaaaatagccccaagaatgttcatgaaacattaacgacggtctatcagacattagaagagaagggctacaacccaattaatcagattgtaggttatctgttgtccggtgatccagcatacattccgcgctataatgatgctcgtaatttaattcgcaagcacgaacgtgatgagattatcgaggaattagttaaaaattatttggataaggaaacgacgaaataatgcgcttaatgggatttgatgtaggatcaagaacggttggcattgcgattagtgatctattgggctggacagctcaaggggtcgagattattcgcatcaatgaagatgaatcagaatttgggttagaccgcgtcaaggaattggttgcagaacatcaagtgactggttttgttttggggttacccaagaatatgaataattcgattgggccacgggcgcttaaagcgcaagaatacggggcaatgctgagtgaacttttcccagagattccggttgattacatcgatgaacgcctaacaacggttcaggctgaacgcatgttagtggaacaagcagatacgtcacgtaagaaacggaagcaagtgattgataagcttgctgcggtgatgattttgcagaactacttggacgcgcacggtcgcttaacacaaggctaataaataaaacaattaaggagttttgatgaatgactgaagataacaagaacatccaccaagatgaagaacaacaaattacactaatcgacgaccaaggtaacgaggaattataccaagtgctctttacatttgattcagaagattacggtaaatcatacgtgctattgtacccaacaagcgctgaagaagatgaagaagttgatatccaagctttctcattcacatcagacgatgcaggcgatgccagcaaaggtgacctattcccaatcgaagacgacgaagaatgggaaatggttgaagaagtactaaacacatttttggcagacgacaacatgaaataagtgcgttcaaaccggttatactttgaggactagcatagtcccgtgaatgagcgacgaagtcgatcgtttgcgggacgtagctagccgcagaagtatggtttgaaaagcacgttaaagaaaagaagagcgtcatcaacggggaacttctgagcatttgcctaacttagcgaattggcgatgcaatcgccgatttgataagtgtagcaaagcacaggaagttgttgatgaaagcacgttatcaccatctatttcaaaaagggtcccgatagcaattaattaaattgcagtcgggaccctttttttatgtggagaaggtgtgggttgaaatgtgctttttaaagctgactcttgtgcttagcttcgtatcgcaaacgaccgactttgtcggtcattcacaacactgtgctaatgctcagagtcaacccgctttaaacgcactttaaacgtgctcttacaggcatatttctgcgcttaactaaatttgccaaatcagcgattacatcgccaattcgtcaaatccagttaatgctcaaaatatcaccgcctgtagtcgcactctataacaatttcttcgctttttccgtgttaataaaatgcaatttagcgaattcgcctaggtaatcgatgccaccttgtgcgagtaaatctgcggcgatttggttaactgcttgatgattgccgagcggaatttggcggcccgcttttttagacagttcaagcattgataggttggcttggtggcgcgcaatgattgaagcggcagcaacggcgaggtgaaattgttccgccttggttgagaaataaacgttctcgcgtaaaacaaccggttcattcttcaaatagttgtagtaaatgccgcgtggttcgaattgatcaatgaggatgccagcgggtttttcgggttggattttttggaggactttgaggagtgcgaaattatggctgatggccttcattttttcgatgttcattgtggcgtgtacttcattgtatttcggtggcatgatgttgacgatgtgataggggagtttagccatcatcttgattgccatctgatcgatttgtgcatcggttagcgttttggaatccgcgacgcctaggctattgacgaacgccagattttcttggctgacatagacggcggcgatggtcagcggaccgaagtagcttccgttaccaacttcatctgagcctaaaacggaccatttggcaaaatcagctggtaaaacatcgcctttggcggctttaggcttagtacggctagcagattttgctttgctaggggtagcggtgccccacttagcagcttctcgttcggcactagcgccttggaaaagtactttgccagatttatagccggtaatgcttagtccattggcttggtgcgcaaaaacggcccccggcggtagttgacggttggtcggataatttttttgaatagtagttaattgtgagggtgtcactttaatgactgcttgcatacgattggctccttaatgagtggcaaatgaagagattcggagtaaaattgccactttcccttatttcatgataaaatagttcagttgaactagcaaataaaatcagagtgcgcaataagctgggtatcttctgaggattagcatagactcgtgaataagcgacgaagtcgattgtttgcgaggcgtagctaaccggaagaagatggcttatggagcacgtttcagaatactttatccaatcaatcatacacacatccacgccacaaaacgcgtatctaaggggaactcatgttaagtctaattattatcttaatgctgttatatgccatttacacaggggtcagacgggggtttatcatgcaagccgtctacacgattggctactttatcgtcttttggattgccaaagcgatgagccaaacactagggcctaagctaagtttaatggtgccatacccatcggcaactgaagacagctattttgcatttttccaaaagagtatcgggttgtcactcgatgatgcgttttatatcggcgtcgcctttgtcctcgtgatgtttatcggtggcttgttggtgcgcttcatcggactattgttgaattcattgacttatatgccaggtttgaagcaatttaacaaggcagccggtggacttttgagtttcttggtcgtttacgtggggctctttttgctcctctacgtgctggctttagtgccagtcgatggcttacagaagacattggaaaactcgacagttgcgcgcgtcattgtcttacacacaccagtcctcacctctcaagtgacgagctggtggattgctggctaaaatggatagtgcagttggggctgacggaagtcgccccttttttagaaggagctaacttaaatgaatcataaaatattacaaacactagaatacgataaaattaaacaaatgcttcaaggccatgccatcacggcgtttggtcaagaacaaatcacacaattaacccccgctaacgatgcggaattgattcaagaacgcttggaccagaccaaagatggggtcgatattgaacggctaaaaggtggcattcctttgccacagttagataatattcgtccgcacctgaaacgaatcgaaatcggtgcgactttaaacggtaccgaactcgcgcaagttgggcgggttttacgtgcgacttctgcggttgtgcgtttctttgatgacttagaaaaagatgaattaaccttaaaggcgttgccagacttagttgcccaattggtgactttaccgcaactaactgaaaagattagaagttctgttgctgatgatggcgccgttttagacacggcttcaaccaagttgcgtggcttacggactggtttaaaacaattggaaggccaaatcagatcgcggatggcaagttatacacacggtgctaaagctaaatatctgagtgatccgattgtcacgattcgaaatgaccgctatgtcattcctgttaaacaagaataccgtggccaattcggcggcgttgtgcatgatcagagtgctagtggtcagacccttttcatggaaccacaagccatcatggaattgaataaccgcttgcgccaattacaaattgaagaacaacaagaaattgaacggattttggcggaattatcggaagccatcatgccagaacgccacaatattttagccaacgctgaattattggggcagctcgattttgtcaatgctaaggctcaacttgctaaagcgttgaaggccactgaaccgctgattaatttagaaaaccatgttgaactcaaacaagcacggcacccattaatcgacccagctaaagtcgttgctaatgacatcgcgattggggcggattatcaggccatcgttgttacgggtcccaataccggtgggaaaaccatcacgttgaaaacattgggcttagtccaagtgatggcccaatctggtttatttatcactgcgcgtgaagagagccaagtcggcgtcttctcggatatttttgctgatattggtgatgaacaatcaattgaacagaacttgagtacgttctcagcgcacatggaaaatatcattcagattcttcaacatatcgatgatcgtagtttggtcttgctcgatgaattgggggcagggactgatccacaagaaggggccgctttagccatcgctatcttggatcaaattgggattgttggcgctgatgtcgttgcctcaacccattatccagaattgaaaatttacggttacaatcggccacaaacgattaatgctagcatggaattcgatgtggctaccttacaaccaacgtaccgtttattaattggggtgcctggtcgtagtaacgcgttcgatatttcaacgcgcttagggttaccaagctcaatcgttcaacaagctaaacaattgatgaacgatgaaagccaagatttaaataatatgattaccgatctcgaaaatcaacgtaaggcagccgaaacggaataccaagctttgcggcatgaattagcagaagcgactgacttgcatcaacagttatcaactgcttatcaacaattcttcgaagaccgtgaaacagaaatgacgaaggcgaaagaaaaagcgaatgcgatcgtcgaaaaagctgaagttaaagcagacaaagtgattaccaagttgcgggatatgcagatgaatcaaggcgcccagattaaggaaaatcaattaatcgatgcgaagtcggaattagggcaattgcaccaagaaacaaccttgaagaaaaacaaagtattgcaacgggcaaaacgacgtcaaacccttaaagaaggcgatgatgttttagttacttcatacggtcaacgtgggacattagtccggcaaatcgatgccaagaactgggaagttcaaatgggcattatcaagatgaagattgctaacgaagaccttgagaaacaaaaagtcgttgaagataaccgacctcaacggcatgtgacaactgtcaacagcggtggagcgcggtatgttaaagcccaacttgatttgcggggcaaacgctacgaagaagcaatggctgaagttgatcaatatgtcgatgcggccttgttagcgaactaccaacaagtgacaatcgtccatgggaaagggaccggtgcaatccgccaaggtgtccaggactacctaaaaggcaatcgccaagtcaagaaatacgaatacgccccagcaaacgcaggcggcaatggcgcaacaatcgtaacattcaaatagagtgcggaagcaggcggttatacgccgaggattagcataggcagacgaatgaccaacttgttggtcgtttggctggtgtagctaaccggaggagtttgcctgctggagcacgtttacgcccccaatccaaccagtcctttctggttttgattgggggtgttttttaggcttgttaaattaaacggggataaaataatccgtttgtaacgaataataagcgagttaagttgttatttacgccatataggagtatcatgataaataatatgttttgtacaattgaatggagggcgaagaataatggttgaagtattaacagataaaaattacgaagaagaaacaaagagtggcgttgtcttgacagacttctgggcaacttggtgtggtccttgtcggatgcaatcacctgttatcgaatcattggcagaaactaacgacaaagttaagttcagtaaaatggatgtggatgctaatccagaaacgcctgctaatttcggaattatggcgattccaacgttagtggttaaaaaagatggtcaagttgttgaaaaaattactggcttccataataaggaacaactagaaacgattttggcacaatataccgactaattatgaaaacacctactatttagtaggtgctttttttatgtgacagcgtgtgacaaaaatgttagtggttgtttaataaacgttgtggtaactttaatgatgaacaaaatgatgaaaatcaaaaagagagagaaagagatggtgaaaaaatgggtcaaaaaatacttaatttttggaataaaccggccgtcaatttcattggcaaaaccataatttattttgttattctgctaattctactttatttatatgattacagtggtatcggtagtcctaaatttatctacaatgaattctaatgaaggagcgtcgttaaaatgaaaaagaatatcattcaacaaattgatgcgattgcaattgaccaaccacaaactgtggcttatcaattaggcacgacgcaacacacttacgccgacttaaaggctgcttcagaccggattgctcatttcattcaaagccaagacttgccagctaaagcaccggtgattatcttcggtggtcaaaacttcgagatggtagcaacttttctaggtgctgttaaagcaggccatgcttatattccggtggaacaacattcagatccagcgcggattaaacagattgaatcagtcgcaacgccggctactgtcctatcatgggctggtgaaacagcgattgatgttaatatgcccgttttcgcagaacctcaattgacagatgtgattgcaaacggagcaaccgattatgatgctagccaaagtgtgcaagggaatgagaatttctacatcatcttcacgtcagggacaacagggttacctaaaggcgtccaaatcagcgaaagcaatttacaaagtttcgttgactgggccaacccagctttcaacgttgcggataacagccgcgttctaattcaggccccatactcattcgatttatcagtcatggatttatttcccgggttatgctcaggtgcaaccttcgtcgttttagaaaaagctgtgacggacaacttcaagacgttatttgaagtcttgccaactcttaaggtgaacgaatgggtttcaacaccatcttttgcagaaatctgcttattatcaccaacatttgatagtgaacatttcccagaattaaaacaattcgtcttctgtggggaagaattaacgcatcaaacagcaacgaagttaatcgaacgtttcggtgatgcacaaatcttcaacacttacggtccaaccgaagcgaccgttgcgatgacgagcatcgaaattacggcggaggtcttagcgacttacgaccgactcccaattggctacacaaaggctgatactcaaactgtcgtagtggacgaacaaaataatccagtcgcagttggtcaacctggtgaactcttaatcagtggcccaagtgtttcaaaagggtacttgaataatcctgaaaaaacagctgcagccttcttcgaaaaagacgggcaacgcttctaccattcaggcgatttggtcacccaaaacgaagatggcttgctcttttataaagggcggaccgacttccaagttaagatgcacggttaccggattgaactagaggaaatcgaccaccacttaagccaattagcagccgttcatcaagcatgtaccgtaccgcgctacaacaaagcccatcaagtcacccaattgattgcctatgttgtgccagcagacggtcaagaagcgggcaatgatttaacgaagacgttaaaagcagaactcgctgaaaatacgatggactacatgattccgcaacgatttgtttatcaagaaaaattaccattatccgtcaatgggaagattgatcgtaaagcgttgattaaagaggttaatggcaatgcctaatttacaaccgtacgcgaatccgaactactttctcattctaggtgcggcgttaattccgttagtgattggcttacttaacggcaaacgttggcatgtttatgagacacttgtctcactgctctttttgatcctaatctttgacggggataaggttcaccagggaattgccttgattggttacgtcctgttcgaaggagcactgatttggggatacactgtctatcgtcaaaagcacaacaacacctggctattcgatctggctgttatcttagcgattatgccgctagtgattgtcaagttcgtgccattcttaaatccgggtagtaattcaattcttggcttcttggggatcagttatctgacatttaagtcagttgggatgattatggaaacccgtgatggcagtattaagaaatttgaaccatggttattcttacaatttatgctatttttcccgacgatttcatcaggaccaattgaccgttatcgtcgtttcaaaaaagattacctaaaagttcctgatcgtgaccattatctcgacttactgggcaaggcagtccacaacttcatgttgggctttgtgtataagtttatgctcggttacttattcgggaccgtgttactccctaaagttgcgcatttagcaatggcgagtcgcggtgggttccttgatatctcatgggggcttgttggttacatgtatgtttacagtatgtatttattcttcgattttgcgggctacagtttattcgctgttgcgacaagttatgtgatgggtgttgaaacgccaattaactttaacaagccatttgcatcaaccaatatcaaggaattctggaatagatggcatatgacattatcattctggtttagagattacatctacatgcgcttagtgttcttcttgatgaaacataagattaccaagaacaaggtcctcattgccaatctcggctatttaacactcttcttattgatgggcttctggcatgggttgacatggtactacattgtttacggcttgttccacgccatctggatcatccttaccgatgtctggttgcgtttcaagaagaaacacaaggatcacattatcagcaatcggtggacgaactacttagcaatttttgcaacgtttaacaccgtttgtctcagttttctaattttctcaggctttttggaccggttatggttccactaagacctacacactaaaggagcgatttaatcatggacgtagaaaatacagtagtagaaattttagcagatttaacagggaacgacgatattaaagacgatatggatatggaattattcgaatcagggacattagattcaatggcaactgtgcaaatgttacttgaattacaaggccaattagatattgaagtacctgtttcagaattcgatcgtgaagcatggtcaacacctaacaagatcattgctcgcgtaaaggaattgcaataaaatgtttaaacgtttatggcaaattttcggcccggttttagtggccggtctctgcttaacagccttattactatcacctcttcgattaggacgacctagcgaaaagacgttgtcgacagcggcgacgtcattatccgccaatgtgctaaaaggggaagccatcaaagatgctgcatttaacgacaactacattccgatgattggttcatccgaactatcccgaatggacgcgttacatccatctgttatggcaaacaagtatgattggcaaaataagccattcctactaggggcaccagggactcagtcattgacccactttttatcacttcaagcgactggtaatcacttgaacggtaaaaaggccgtcgtcgttatttcgccacaatggtttgtaccacaaggggtaaaacctgagatgttcgatttcttctattcaccactacaaaccagttatttcttaatccacgcgaaggattctgaaagtacgcggtatgcagcgaaacgaattctagaactcacaagtgatacaaccaacggggtaatgcgggatgcattgaagaacaaagctttaggcatacctttaacggagacgcaaaaagtatacattaataatgtgaaacgcccagcgttacaacatcaagatcaactcttcagccaattattcattcggggtcgtgaacgcgaattgcgtaaaggcttgaaggtgttaccaaaacaacctgataacatgcaacttgatcaagtcgcaacggaattaggacaaaaagtaacgggtgataatccgtttggcattcaaaatagtttttacaaaaaacgggttaaacccaatgttggtaaattgaagggtgaacaaagtcactttaactatgaaagttcacctgagtttgctgatttccaattgatgttagattacttcgcagcccataaagtatctgttcaattcatcattccacccgttaatgcgcgttgggccgcttatacagggctctcacaagcgatgttgaatcgttttgataagaagattcaatatcaattgagaacgcaaggcttcaacaacattgttgatatgactaacgacggtaatgaacaattcttcatgcaagatacgattcatcttggctggcgtggctggttgaaagttgatcaaaaactccaaccattcatgagaacgaaaaaagcaaaagcagtgcactatgacatgtcaaacgacttcttaagtcgcgactggcaaaacgtcagcggcaataacgtccatgactttgattagagtgagacagagccggttatcacttgaggattaacacgtttaatatgctaagtattcaaaaagggtaggaacaaaatttaattttgttcctaccctttttttatagcacatgcttatctgtgttttctatgcatttctcgtcgacttggcaagtctgccacgcgggttcttgtgtagtgtggtgtttcttcagaagttggcttgttttctggttccaccggttcaggaacaactggtgtttctggaacggattctggttctagtgtgggagcagccacttcttcaggggctgcttcaacaggttgtgtcatcacaggtgctggttcttcttcaacagattctgattcacttggtacagatgcgacttgtgatgcatcaaccgttaaatgaatggcttcgactgcttcgtcttcaattggtgcttttgaatctgtttggacgaaaatcgttacgttttttttattttcaatggttgctttggcttcagtcacaatccgcaattgttgttcgaggatttgggcaacgaagccggcttctaattggaagtcaggagtatcgaaatccgcaatccgtgaagcgacaatcgggcctgttaattcgaagaagtattgttccttcttctgtttcttaagactgagatggccgaagttgatttgttcgaagaaggcacagaggtcttcgaaagaatcgagtgggaattgcaaagcgagttgcttaccggcccaatagctgatggcgtcattttcggccccaagaattgatggtaacaagatatcccgtaatgttgcctgtgtcagatatgatgcagtttgtggattttgggcgagttgttcatagcgtgattgagtcacagtggcactcctttatggttcgttttttataagtactcctattataccgcgaaaactctttattttttataaaaattaacgccaactgtgaattgccggccgtgcccgttgttttagttgaattttgcaccgaaaaaagagaaaatagaagttacgagtgtatcctgaaatgaaaagagaaatctaatatgcaaaaacaacccattggttttatggattcaggtgtggggggcctaaccctcttaaaagaggcgcttaaacgtctacccaacgaagacatggtctttatcggggatcaagcgcgcctaccatatggtgaaaagccggcggaaaccgtgcgcaaatttgcgtggcagatgaccaattttctacgggggcaaaatattaaagcattggttgtcgcctgtaataccgcaacggcggccgccttacctgatttacaagcgcaattgacgattcctgtaatcggtgtgattgcaccaggtagccaagcggcattggcaacgacccgtaatcggcatgtcggggtaattgccacgaccggaacgattaacagtggcgcatatgcctatcaactaaaggcactcaaaccggcgacacacgtcacgagtttggctgcgccaacttttgtaccgatgattgaagcaaaccaattgagtggcgaaactgtgcaaaacacggttgacgaaaccctcgcgccattaagcgggacgggaattgatacgctaattctcggctgtacccacttcccattattaaccgcggcgattcaaaagacagttggaccggcagtcacgctggttgaccccgcgcatgccgctgttgatagtttgattcaggcattacaagatcgcaatcagttggtggccgatgcaacagctgggcaactacacacctatacgaccggatctgtaaccaatttcgaagcaatcgcgcgtcaatggttagcaatcccaacccttgaagcccaacaagttatcattaaggaggaaaaaaacgatggtccgaatgaataatcgtgctgataatgatttacggccagtgcaagtcacttggcgttttctaaagcaacaacccgcttctgttttatggcaacgcggtgataccaaagtgctcgctgctgttcaacctacagaaggttccttgcaagtcaatggcaatggcataacagcgcaccaattagaatggttgcaaacgacattacgccccttattggcaaccgaagcactcactatcaccgtaacctgtcttgaagatggtggcggcttattagcagaactcttcaacgctgtttattgcgcactaaccttattaccaaaaggcaaaggccccaaacaagtcgctgcagccgtcacagcagcgatggtcgctggtgagtcactcggtgacccagacgccgcggaaagcgacctagcgactagcttggtgacgatggtggccacaccgcaggaacaaatcatcgcccttgaactcggcggacaacaagcagtcaatagtagtgaattcaacgaacttattttacgtgcgagccaaggtgtgacgcgaaccaatgatcaacgtcaagccagttttgaacgcgccgttcaaccgaatatccaagtggctgataccgatgaacaaacaatcgtgattgccacgaagaatccaggtaaggcccgcgaattcgaatccgtcttcgcagcggaagggattcaaatcaaaacattattagattacccagaattgccaaacattgatgaaactggttcgacatttgaagaaaatgctcgcctaaaggcggatcaaattgcagcgatcttacacttacctgtcttggcagatgattctggtctaatggttgatgaactaggtggtcgtccaggaatttattctgcacgcttctctggtgatcataacgatgccggcaacaacgcgaagttgctctatgaattaacgggtgtgcctgctgaaaagcggaccgcaaccttccatacaacattggtttttgctaaaccagaccgaccagatgaagatttagtcgttgaaggtaacgtgaagggccaaattctaggtattcctcgtggggataacggcttcggctatgacccacttttctacgtgccagaattagatgcaacgatggcccaactcacggtggaacaaaaaaataaaatcagccaccgcgcaaaagcaattgagaacctagaagataaatggaaagaatggatcaaagactagcgtgcgacggcaggatcacgtttagatttggctgatgtagctagccggaagaatatgtcggaagaagcacgtttcaaaaaaacaacgccccttggcgccgaaaggactgtttagtatgcgttttgttgttgtgagtgatagtcatggtgatcgcgatattctcgtgcagttagtggcgcagtatcaagatcaaccagtaaccatgttacattgcggggattctgaattaacaaccgatgatcccttgtttaaccaaatgaccgttgtgcaaggcaatatggatttcaatggtcaatttccagcacaagttgttgtcccagttgcaaatgaacgaatcttcttaacgcacgggcacttgtatggtgtaaatggcgatttaatgcggcttttattagcggcccaagaaagccaagctaatctcgcgttctatgggcatacacaccaattggcctgtgaaatgcacgaaggtgtgctgctcttgaaccctggcagcattgcccaaccacgggggcagttccgtgacttgaaagggacatacgccgttgtagacgtcacacctgaccaatatcaaatccagtactacaatcgtcggttcgaacccgtttcgcagttacactttacatttaaacgcgcctaattctaaagactatccaaagtttagtagctatggatggtcttttgtgtttgctctttgttacaatctaaaagtagcattagtttattggaggccaagtgatgatttcagatgcattttcgaacttattattagaaaataaagaacacttcttaattcccggtgaggttgttgcgagtgttcaagaaagcaactccttggaacatgcgtttattctactaaccacggtgaaatattcgagcattcccgtcttagacaaccattcgaagttcaaagggatgttgacgatgccgttaattaccgagacgatgctcggattgaataacctcagtttcgaaaatttgcggaagctgaccgttaaagatgtcatgcaaaccgatgtcgtgacgattagagatccatatgatattgaagaaacgctccatctcttagttgatcacccctatctgcctgtgatttcggatgaaggggagttcacagggattgttacccggcgcgaaatgatgaaaagcttcaaccgagtagcccataatatcgaaaaagaataccaaatcgagccaataaccgcagaaacaacccaaaaaggacaataagggttaaaaaagcgtcttccagacaccaacgaataatgtttggaagacgctttttgttttggactaaatccagcttaattactggtatatcaacatttgtaagcaaaattaagttagacgtaatgactttaaaaaatccatgatagtaggtcataactcatgagttgtgaacctcttatatcgttacatattgttcttgggtaatgatggttagatgactaatattcacccctgcataggcattcttgggagtctagcctagggggaagtagtgataccgtcaaagttatgcctgatgaacatagtcaaaatatcgaaaaattatcatgtaacaaagttttaaaggcattagaactgggaggaaatttgatatgcaaaagagagtcgtccatctaattttagcaattattttcttaaccactacaatcgtacagtcatttggtagcgcattagtggtggctgtgaataaggagacggtgacagccaacacgacttctaagattgtgaacccacgaagcgcaattgaaggcgcgagctcagtttctgaaagcttagccagttcgttgcaatcacaatcgacaagcagtgcttcaacaagctcagatagtaagtcgagttcaaagagttctgattcagaatcgagttcaagtatttctgagaaaaaggaaagcgttaaatcgaacacgagtaaatcggtgattattcaatcacgatactggctttcagatttgactgatccgggcagtgaatatccagacttttcgattcctttatctggtcaaaacaacgttacaacgattgaagatgtagctaacggaataggttatattagacaaaagatcagctcctaaaagatgggtttgtggtaaacaccattttaaaggaagctgatcttttttgtccgaacagcgttcggattaattttacaatctaccaaaagttttttaaaattgagaggttttaattatcgaatagaagtagtgttaattctatagggcctatgaaatgttgtgtcctttgactataatgtaaatgatatacataaaatatgaattggataggtgtctaaatatggattattctagtgaagtatatgaagaatttagaaactcaataagggatcaaagatcgcaaggctgtgaatggaaggatattcatgatagctatggaacaccagatgaattagcgattgaacttaaactattacgaagacgtgggaaattcgatggtgagttctcaatgcaagattggcatgaacttgtcgattatatggagtctattgataaaaaatcggcgataactaaattaacgagtcactcaggaaatgctgcaaaagtaccaacaagatccgggtcacagtgggttaattatcggaagagattacttaagaatggcttctctgagacatcggtagatgaaatacagagatctgtgcatgcaattttgcagcagttggattctaaaacatatattgagaatgatgaggatcataatgggcgcgcggtgaaaggcttagtggtagggaacgttcagtcggggaaaactgcaaatatggctgggcttatttctatggcggcagatttagggttcaactattttattattttttcagggattattgataatttgcgtaagcaaaccgaggatcgaatgtacgatgatttaaagattccgggaactaatctatcgtggaatcggattgctaatccgagttctgcagagagggcaccagaacataaatgggctaaaattgatctaagcgagggtagtaaacagagatattttacagtttgcttaaagaatactgtgcgtatgaagcaacttaagcagtggttgtataaatctaagtccgcacgagctgggttaaaagtgctaattattgatgatgaagcggaccaaggtagtatcaatactaaagtgattagtaatgatgaaaacgacgagaatgaccggacacaaattaaccaacatatgttagatattgtaaatggatttcaagataagaaattacgagcagttaattatattagttatacggcaacgccttttgctaatattctgaatgaggttggtgacgaatctctatatccgcgtgattttattgttcagctaacaccatcagatgattatattgggccaaaacaaatatttggcctagaacagccagaaacgaatagtgccgttgatattgtattatcgataccagataatgatgttcttgatattaaggatattcaaaaaggtgaaatagatgagatacctaattcgttaaaagatgcgttagattggtattttgttgcttcatgtgcactacgttttttaaattttaaaaaaccgacatcaatgctaattcatactagtcagaaaaaagttgatcatgaaaatattagaaaatccgtagagaagtacttattgcaacgcgcacaagataaatatgagtatgttaaacatctagaagaaatctatagacgagaaagattggactttaaacgtcagagctttttagatggtatgccgcagtattcaaatcccaatatcgttccagattatcctaaatgggcagatgttcgagaagaagttcaacgtgtattagatgataaagataattatgtttctacaattaaaatagatgataatggtgagttacagtatcatcatggttttcatatggttgttgataatagtaatccgcaagtgcggaaagatgaacagctacggttaatctatcctgataagggaaaagcggagtttacgccaatgtttatcgttattggaggcaatacgctatctcgaggtttaacacttagtggattaattacatcttactttactagagcaacaagccaagcggatacacttatgcagatggggcgttggtttggttaccggcaaaaatatgaaattttcccacgtgtttggttaaccaatatcattaaagaacggtttgattttatgagtcaaatggtagatgacttacgtgaagaaattaccgaaatgtcagaaagaggaacttttgcgccagaagattatcgtcctaaggtaaattattcaccgtctctacaatttttaagagtaacagcaaataacaagatgcaaagtgcggaagaagccgaagttgactttactggttttaataagcaaaccgtactttttaaaaatgatgctgatacattaagcgcaaatattcgcctaacgagtcaatttttaaatggtttagaaacgtttagtgataccaatattgaacaaggctacttaaattggactgatgttccttttgaaaaaatatgtaattatttggaagccttccattttgccgaagaagatactgcttttaataatattagcgggcttttaaaatggtataaggatattatggaatctgaccctgatagttttactgattggaatattgtgtttagtacaaccagtaacatccctatcgccaatcgggattcagcttggaatataaaggggtacgcacctcgagcaatcactcgtacagctaaaatgaaaagttcagaaggattggcaaacattggtgcattacgtgcgccaacagatttatacgcggatttaaacttgtctacaagtgaattaaatgcgcagttgagagaatctgaaagactagctcaacaacatgttatgcgaagaattcgatatgaatataattacgggaaaacgccgttgttagttatttatcggattgataaggattcaaaagtaaaagagaactcaaaacgccagaatctagaattttcagaagatattattggtatgaatttattaattccgagtcaattaaacccagatagtaatggtaaagagcatgttagaaaaatacggattaagcgtcctgaaaacttagaagatttagatcaggatgaataaattaggagactagaatgcaaatatataaattaccacgtagcctaatggcgcaagacggtaaaggtattttgcgaagtttgcaaaatgagaatatgccctacgctgatattgtaattcgtgaagcccttcagaatagtttagatgctacgaataaagatgaagatgagacagttgttgaaattcagacgaataaatttaatagtactgctgttgcgtatcattttgaagaaatcgaatctgaattggttaatagatttccaggcgagcagcttgctttagttttaaaagacaaaaacacatcaggattaagcggatcaattgataccagaacagataatgataccgaattaaaagaaagtaaattttataagttagtttatggactctcaatgaatcaagatgaacaaggtgctggtggttcatggggattaggaaaaacaagctattttagggtcggtgcggggattgtcatctactatacacgagtgaagttagctgatgggacttatcaagaacgtctagcaggatcgttaattgaaaatccagatggggataacccactactagattcaaagatgggacttgcttggtggggagaaaataatgtggctgaatctggaacacacccgattgttgattcggcacagattaggaaaattatttcagattttggtgttgatccatacgtggataatgaaactggtacgacaattattattccatatattgatagagataaattaacaaatgatagaagtgttgatgatgagaaaatcccgtggtttgcagctgaacttaacacttcattaaagttagccgtacagagatggtacggaccgcgaatcttaaatagtaaataccgtcaagaaattggtaattccgaattaattgtttcagttaatggcgattatgcacaacctgcagaatttgaacaaacatttagaatttttagaagattatatgacagtgctctaaccggtaaagctgttaaatcagatatagaagttaaagaaatatccggtttaagaaaagcactcaccagtaccagtgaagtattgggacgagtagcgttcacccaggtttctttcgaagagttacatttagtaggtggcgatcaagatttaacaccgagtcggtatgtaggcgttgaaaatgatgatgatggacagcaagggcaaggtattattgcatacagtcgcaagccaggaatggttgtagaatacgtcaacgatgcgtcaccttggatgcagaaagtgaatattccagataatacttacttactagccttttttgttcctatcagttcggcaaaacttcactcagactacaataaaaatggctacgatatcttggaggattacttaagagatactgaaagcgctgatcatgctgagtggaaagataaaactaatattactttaatcaagaggattcgagataggatttcacgttcgctacgagaagttgttaatcaaactgaacaaaatgcaataagttcgagaacttcaaatttatcgcgacaggtggggcaatcaatattaccaccctctggttgggggaaagcgggctcacctagtgataatggtaacgacgaaaagacagtaaagccgagtgtttcacatatgtctcaacaaagtgatataaagattgaaaatgttatgagacttagcgatgaacaattacgtgtagagtatgaggcgtttttaacaaaaaattctaatgatattattacaattgaagtattaacaaatgatggattaatgaatgaggagaaatggaatagtcagttagaaggggtcgtatcgtttccctttgagtttaagggctcgataattagtaagtctgataatagtgctgtggaaatagcgaatatggtaacgattaaagaagtatcaggtagtttgaacagtgaattagaggttactaataatttggatgatgatgtaacgattaatggtgcactagttataaaggtaagagactttagcatgcaaccaagtattcatatcagaaataaagttgctaaaggagggaataataagtgaacgctcatataattccgttatacgcggttataacaaaatcgttgcaacgaacggtggggtataaaagtacttcgctacaagtgatgtacacaaatcgagatggtgaagaatgtgaatttgatattaactcggcaatcaaatcggatcctatcgtaattaatgattttgaccctcggtggagtccagaagataataatttaatattgagtatggcatttagttttaataagcctagtggtctttttggctattcgggtgtaacagctagtaccaataaactagcagtaggctatacaattgcttcgaaaacgtctgggtttcaggaaacttgtaaaattgatagtattcctaatcaggatagtgagtgtattattgaatttgaaaaaaattttcataaaggtttgttaagaggtagtttctcaattgaattttttatttacttagaggaaataagtattcatttagatggtcaagcgggaattgttggaacccatatgacaacagacccgctactaacatatcaatttattgttgatggtaatggatcaatgtttccaattgtggaaatcgatcgaccaggggacccattatggaatttggatatccaatggagcgatccaatggtggatacgttagatgagtctagtgttatcttgaagcttaatagtgcacacccgcgatttaatgggattgttgattcacggacatactcagatcgatatatcatgaaagaaattctgattcaagtaatgactatgattattcaacaagcattgcaaatcgaaggttacgatataactgattttgaagatgcagaaaatggaacgattgctaaaatgatttggtactgggtaaaatcatttaatattcggacgagtaagagtgagtttgatgcagtaagtatttcaaactcaattcgaatgaatgaagataaattttagggagttttaatgatgatttcatttccaaattatgatctaaatcgcgcgcaaagagatttcgatacaatggatattgattcgataagagaagagcaattttctatagaaggtgaattccaggaattgcgtcaagaattattggaattatgggaaagtgtgtattctgagcatgatttgagcaccggaattgaacacaaaaaatatataattgatttgtactttggattaaagatgtataacttgtttaattctaaaggattaacaaatcgaatggcgacagatgataacatctggcgtttcttatcgttgaaagttgttccagaccttgtttaccgtagacaaggaatgaaagaggactatttttataagaagacacgtcgaatttggcttaaaacgatatattggtatatcaatcttggatggcaaggttcttcagaagaaacaattcgcatcttaaaagataattctacggacacaatcatgcaattagttgaccggattagtactcttggttacaatgttccgctatatagagaaattatgaagcaatatgctggtaaaacagatcgaatggcttttcggcatgttatgattttaaataatgcgaaaactaggacgatgtctccagaattagctgagggtgaattaaagggttatgtagaaggattatataaggcagttgatggtgaaaagtaatggcgaaattttatgattcagcattataccaaaatataattctaaataatgctaaaaatgcagtcaaattatgtattatttcagggtatgggtcagcagcgttcttaggaagagttatggcggaatttccgaagctcaatatagatttatatttagggatgacaccgcaaggtattagtaaacgaaatcacagtgggtttaaagcgttgatggcaagatatgataatttgaatgttttttatcagattaatgagccggttacgcatattaaattgcttagttttatgtattcagatgcaaggataatttcgtttaacggttctgctaattttacggagaatggtttttttaattggcatgaatcaatgagtgaggcggaaattgattcagctgctattttcgaatgtcaaaaaatggagtctaagttatgtattgataaatcaatagaattggatattaatatctacgaagacgagactctaaagcttgaagacgaaattgctgaggacgatatccaaatagaagcgggtgccatagctgagcaaagtgaaaataaaaaagctcaaagtaaatttgttgtaggttctaaaaaattatattatggctttgaagtaccagttctttttgaaaatgataagtcgaaacaagctggtatcaatcaaaagaaaccctatttaactgcatctaacaatgcaccatttacagcaacttttgaacctggggagaaaattatatttaaaactgatgagggtaatatatttacggcatatgttgatgaacgaaaatctagaaggatgtattttgaacaagatattaagtcctatattacaaaaaaattgaatatctcaaaggataatttgatagaatactcggaccttctaagatatggcaaacaacatttgttattagaagataatggtgataaaacttacacaattcatttttaagattgagcaaaaagaagcacaatctgcttgcagattgtgcttctttttgtctgggaggattagataatattatgttgctgcacatcgagatgacgaacattcttaaaaaacagattgtctattctgtatgtttgtgtgaatatttcttcaaggacgttcacaacaatgctgtttccggagagtttaagtagctttgagtggctcaacattgagcgacttttggtgacattcatattattttgaattaagttatcaaaatcatcttcatcaaatcccattaaaagaaaagtttcacggggagttaagttacgatagggcgctttattaccatccaagttcaattcgtgtattataataccggcatttggatttctatcttgttttgtggtgatagtttttgctattggtccaagtacttctttaccacgagctaatttaacagaatcattataaatagtttctcttgatggtgtccaatttggtgtactatcaagagcttctcgtaagtactcgggacggctattataatctagacgaagaaattttgaaatatcaggatcatctttaaattgatgaagcttattttggcgattatctaaaaatttttgaattttagtccaagattctggttgatcttcaataagaacactaagcatataggttctaactctattttgggggattccaaaattcttggcatttagatcaagatcggcataacttttatagcctagtttttctaattcttttttccacatattaaaattatcaacatttctaggactcttgatagcagtcacattttccattagtagaaatcttggttttttaaggccttgattattgtattctttcagaatacgttcaatttcccataacaaacctgatctattattggcatcgcgatcgataccagaaaaatttttatgccaataagaactaatggaaagatcttggcatggaaacgaataagttaacatgtctgcttcgggaaggtcatctgcgtggacggacgaaatatcaacgagattattgttgtttacaatactatgataaattcctttgagcttctctagattcatacgctttagagtgtatttacgaccatccaagttatcagagattggatttttcccatctgaacttaaattatataggctaagacgatccaccagatcatcctttgttaaattatcataaatagacaggtcctgttgtccgttatgaataatgtcataggcataaatggcaccgatttcccattctactgttgcaactatgtcatatttataatcaggaattctggcttttattctttccagagctttggcttgggctccaattccagaaaaggtttcgattacttttaaaaccatgtagaatccctccgatctattatattaataatagcaggttcactaaaaaaaggcaaacatgcgttctttttgtatcgtataagatacacaatgaggattattataacatttttcaatagtctacggttgggataaattatatataatggtagattgtaaaattaatccgaacagcgttcggattaattttacaatctaccttaatgccaaaatagcctcagtaattttgattttttcggtgtctgtatcgtaattagcaacggcaatgcgcaataaaaagctaaacagcagtgattcatcaagcaaagtctgttcaggtaagcctggtaattcaagggtaatcgtattagtcttgttaattgcttcaaatagttggtgaagttcagggtttaaggtgatcgaatacttcttttgaatgagatcaaaataagtgaccgattccagtgcttcaatctgatgatgctgcgaaaaacttaaatgtggtttaagcgcggttggatactgggaacgtgtcgtcacgaagtcctgagtcacactaccgcgataaatagatgtataagtataaatcatcaacaagcgaatgtttaacggatcgccaacgatgttttgcttacctctaaatgaaatggtgacgtagaaggtgttgaaatagacgcgtaattgtttaatacaattttgcactgatgaggtcgaaaaatttgttgcttctgccaaggtttgaaccgaattgtaatgatgtttaaaaagcgcgtccatcacttgaaagctggttgttcgaataatgtaagcgaaccgaagttcaaaaagaatcgcgttagaagacattccttcaggataatcgagttcatagcggttattgactgttgttagctgaatattggcgtctaattcagcaaggtctagttgcaactcttttaagtagcaaattgcagttaatttagaaagtgagaaaggaaggatcgctttggaatataaagaaatctcacctgcaacattgggtgaggaacgattgcgatacgatatccaaaaaggagccttcgctaatctttcggaaagagaattggctgagcgatatggtatcagtcgaacagcaatgcggcgctcgttatcagtcctccaaaatgaaggactaattgaaaaaaagccacgtgtgggaatgacagttaacaataagcatgtgattaacatgctggcaatgagttcaatgtcaacggagttaaatccagacgaaattcaaaccgaggtcttacaaaccgaagaaccagtcgaagaagatgttgttcgatttttgaaggcagatcatgtatttgaactaccgcggaaacgaatgattaatgggaaacccatttcgtacgaattagcttttttaagtcaagaacgctttccagaaattgagcagatctcttttcagaatcggtccctttatcaaacactgaaggatcaatatggggtggtcttaggctacgggcatgaaacgattaaagcaggatatgccgataagaaacaggctatcatattagaaataccagagaagacaccattatatattgtaacaagcttggcttacgatcatgatgatgagccggttgaatatagtgtccagtatctgattgggaatcaaattcgttactgattagatgcgaaaaatatttttgattatcgtgaggatggtgatttgtgatgaaacaatacttatttgaaaccatttcagacgaaatcgaaactcgcattcagcgtagcgagtttaaaagtgggatgtttatgccaagtgaagctgaattacagcaattatttggtgcaagtcggacaacaattcggaaagccttagataatttagttgctaaagaactaattatcaagaaaaacggtgtaggggtatacgttaaaccccagatttcctcgcaaaatattttagaaatgacgggggtgatgaagaataataacttaggcaacgcagcaaaacagattaaagaatttcatcttcgcaaagcggataaatattatggggaattatttgatatcagtgacaacgcgttgttgtataccatcaaacatgtttatcaagaaaaaaagaatcaggtttacgaaacgattattttaccgcagcagttatatccgactttgagtcttgcggatatccagatggtcaatactatcgaacttgtcaattcggctaaggaaaatttctacggaatgcagcaagatttacagctcgtcagcatggcatcaacgcatgctaaatatttagatctagaagaagatgcgttgctctttaaattgagcagtcagtattacgctgaaaatcataaagtgattgggatttcgaatcgctatgaaccagctgatacaacagaatttaatattgattttaattaagggggacttcacatgatagaatttttaagaattgatcaccgtttattacatggacaggttgcagtttcttggtttaacgaattagatgttaatacgattttagtggctaatgatagtgtggcgggggatgactttcgtaaatcagcaattcgcttggcgaagccagaacaagcgaagttagtgatgaaatcaattgatgacagtattagtgctattaattctggcgcaaccgataaatataagttgttaattgttgttgaatcagtagcggatgcggagaaattaatcaaaggaacgggcgataagattacattgttaaacgttgggggcacaaaacaacgagaaggaacgaagaattattctaaggcggttaacttaaccgatttagaagtcgatcaattaaaagcgctttctaaatctggtgtagacgtctttatccaacaagtaccgaatgaaaagaaaatgatactaccagaataaaaggaggataaactcatgaaccatatattgattgccatattattagcgttaacagcgatgttggcgaatgctgaatatttatttggatcatcaatgttatcgcgaccacttgtgacgtgtaccattgctggattaattatgggtgatatgaaaaccggaattatcatgggggcaaccttagaactggcctttgtggggtcattttcaatcggggcttcgattccaccagaaattatttcaggtagtattttaggaacggcctttgccattggtgccggtaagagtacagccgttgcgttaacattgggcattccgattgcatcgttagtgctagttattaagaatctgtgcttcatctttgttctgccatactttgttcataaggcagataaatacgcggccgagggtaattcaaagggcatggatcggatgcaattgttcggtgggttcttctcaatcaatttaccaatcggcttaatcgttgcaatttctttcatcgttgggagtccagtaattaagtcattattagcggttattccaaaatttgtcatcgatggtttaggaattgcgaccggcttattaccagcttatgggtttgcgttattgttgaaattaatggtcaataaacacaatgcaatttactttgtattaggatttgccttagcggtttatatgaaagtccctgttactggggttgccatctttggggcttgtcttgcattggtattaactggctactcagctttcaataatggacataaaggcgagacagttgctgcaagtacaacgaatggaggcatcgattatgaagatgaagaattctagtttaatctcgaaaaaagatttgatgaaggttttctggcgctccttcacgatggaatgggcctggaattatgaacgacaatcaaatttaggctactcgtttgcaatgacaccagcgttaaataaaatctataaaggcagtaaagaaaaattaacgagcgcctataaacgacatttggaattttataatgtaacgccgtggctttctacatttccattagggatttcggtagcaatggaagaacaagcggcattagatgaaaattttgacacagatgcaattaacaatatcaagattgcgttaatgggtccgctaagtggcttaggggattccttcttctgggggacgttgcgggtaattgcgacaggaattgggacttccttagcgcttcaagggaatctgctagggccgctgttattcctgttaatcttcaatattccggctgttttagcacggtattacgggttattcattggctacaatatcggtgcgggcttcatcgaaaaagttcaaaaaacgggtttaatggataaactctcctttggcgcttccgtcttagggctgggcgttgttggatcgatggtggcgacaatggtgacgctgaagatgccattgacgattggtgcgggtaaaggtgcgccgactgttcaaagtatttttgatgggattgtaccaggcatcttgccattactctttacgctctttattttctggttagataaaaaaggcttgaaagcacactggattctattattaattgcagtaattggaatctttggtgcttacacaggtctactgaagtaggaggcagcaagcatgcaggatatgttgcattacattgaagcagaaccgaaaatctatgctgatatattagccaatcggcaaacgatattgcgtacgttactgaatgacaaatcaacggcatataaaaatgttgtgatttttgcaactggatcgagttcaaatgcggcgtttgcggcacagccttatatgagccagcaattgggcattcctgtttttgtcgaggagccatcttttacggcgaactatatgttgcacctgcaaccggatacgttgtatatcgccatttcccagggtgggcatagctactcaacgattgagatggtcaaacgggttcaagcaatcaacggccggatttataccatcactggtgatgaaaacagtccgattgccaagctaagtcagcatgtgattccactagggatgccaattgaagagatgccctatgtgaccgctggctatagtgccacgattttgacattaatgttgttggcgcttgaattgggtaaacaggatcaagcgagttatcaaacgaatttggcagcgattgaaaacattgtgactgacctaccacgcatcattgatgctgctaaagaatgggtagcgcattatagcgatgtgtttgatacagtacaacgcgtaatctttgttggttatggtggcacatacggtgtggcccgtgaaggtgaaactaagattacagaaacagtgcgtattaccgcactcggtaaggaagttgaagagtatatgcacggcccttatattggactccacgcaagtgatcatgtgattttcattgaaccaaacgggaagttacaagagcgagtcgctaagttacaacaatttttaaccggcaaagtggcgaaggttgtccgaattacgaatggccaagttgatcgtcaagacgacctcggcttagcgttaccaactgatgagttgttagccccactctttatgactattccaattcacttattggcttataccgcatcagcgcgcaagcaaattaatctaaaagtgtcagcttttccagattttgacccaattacaaattcaaaaatataaaaaattgaaagaaggaaattgagatgttgaaatttaacgaaaaagaattattggcaaacttagaaggcggaattgcactcagatcagacattaataaaattgtcgatcaaattaatgatgagggttatagtaatatttgttggattgggatcggtggcacttatgcatcatccatgcaagcggtcgttcacatgaaagaaagaacaaaaattgaaacattctacgaaaacgcagcttcgttcttaacaactggcaatctccgagtgacaaaagacacggttgtgattatctcttcagttactggaaatacgcaagaaatggtcgaagctgtcaagaaatgtaatgaaattggtgcacgtgtaattgggtttgttgatcgtgcagatgccgatttagcaacgatgtgtgattatttaatttcatacccattgaatgaacaacttaagttcttcatggtaggtgatcgctttatgtatttagcaggggaattcgatcaatacgacgaattctacaaacaaatggatgataactttgcaaaagatgttgtggctgtttataaaaatgcggacgaatttgctacagaatttgcactgaaacatcacgaagatgaaatgcattattttgttggggctggtaaccaatggggtgctacgtattcatatgcaatgtgctattgggaagaacaacattggctcagaacaaaatcaattgaagcgcaagaattcttccacgggatgttcgaaattgttgaacgcgatacaccagtcacaatttacgtgacagaagatagtcaacgacaattgagcgaacgcgttgctaacttcatcccacaaatctgtgctaattatacggttatcgatgcgaaagattacgacatgccggggatttcaccagaattccgcggtgcattatcaccatttatcttgcatgcggtcaatgatcgaattgatgtgcacatcgaagacttgaaccgccatccaatggaaattagacgttactatcgtcaattgaaatattaaaatggctggaggaacagagatgattggagttgtgatttgtacgcatggtgccgctggtagaggtctagttcaagctgctgaaatgatttgtgggcaacaagtgcatttagcagttgtttcttatgaaatgggggaaacgacagaagctttacgccaacaaattaataaaagttttgcatcatttgaaccactatctgaaatttttgtattgactgatattaaaggtgggacaccttttaatgtgatggttgatatcattcgggatgcgccacagtatcgactcgtatcaggtgttaatttaccgatgttacttgaattattcatcaaccgtgacaacttgggattggatgcattaacagataaagtattagcatctggtcaaaaggggatttatcaatacactgtttcaaatgaggatgctgacgaagatttctaattaataacaagagtcgtgctgtttaaaaatagcgcgactcttttattatgttttacgtgaaacatcctaagccattgttccacagaaatcccgaaaagttagcctaaactaaaatatttgttaattccattaaaatcatgtatgctgtagtgagaaaagttaggtttacctaaaagaatggaggctctttatgttatcagttaagaacctcaccgttgcttacgatgacacaccagtatttactgatgttgccgttcagtttgacgcaggcaaaatcactggcatcattggaccaaacggtgcaggcaaatcaactctgattaaagcaatattagggttggttaaggcacggcaaggctcagttttatatcaagatcgaccaatgcgcgcagtccagaagcaagtcgcatacgttgaacagcgtaaagatttggatttaaattttccaattaacgtttttgacgtggtactaacgggcacgtatggcaagttaggcttattccgcgatccgggtaaaaaggcaaaacaagccagtcgcgcggcacttgaacaagtatcgctcagcgaatttgcgcaacgccaaattggccagttgtcaggtggacaattacagcgagttttcgttgcacgcgccatcgtccaagaagcggatattattattttagatgaaccgtttgttgggattgatttacagagtgagaccgcgatcatggcaatcatgaaacagtggcgtgatgcgggtaaaacaatcattgtcattcatcacgatttgaataaagtatcgcaatatttcgatgatttagtggtgatgaaccacggcatcgtcgattatggaccaactgaaaaagtttataatgcgcaaaacattgagcgtgcttttagtgcggacttatccgctgtcttgtttgatgcacaggaggtggcaaaatgacgagtattccagcttttattagtgcgttgggtcgttatgaattcttgcagagtgcgttgctgaccgccgtaatggtcggcatcatgtctggcattgtcgggagtttcatcattttgcgcgggatgtcgttgatgggtgacgcgatttcacatgcggtgttaccgggtgtcgcagtggcgtacatgttgggaattaatgtgctggttggcgcatctgtatttggtattttagcggcagtcttaatcggctttgtcgcaacacatagtaaaattaagacggatacttcgattggggtcgtctttagtgccttttatgcgcttgggtttatcctgatttcgatggccgaaagtgcaaccaacttacatcatattttattcgggaacattctcgccgtcagtgatagcgacattatgagtacggcgattgtcttaggcttagtgatcttattcgtctcattcttctacaaagaattattgattacctcgtttgatgaaacctatgcgaaaacatatgggttaaaaacgcaggtgctacattacggtttaatgttggtgctaaccttagtcacggtttcagccctacaaacggtcgggattattttggtcgttgcgatgttgattaccccagcagccaccgcctttttatggacggatcgcttagtgacgatgctcttcttatcggctgggattggtgctgtgtcagcaatcagtggattatacttcagttacacattgaactgggcatctggtccggcgattgttttgatggcagctgtgctctttgccatttcattcatctgcgcacctaagcaaggtttccttaagtggcgcaaaggaggacgaccagcatgaaaaaaatgattgtgacgttaatcgcagtttttggtttggtgggtggtgtgtatggcttcatccagcaccgcgcccaatctaaacaacaacaaacgaaccagcagactaaattacgtgtagtgaccacgaattcgattcttgaagatatggtccataatgttggtcaagaccacattgaactttacagtattgtgaaacggggaactgacccgcatgaatatgaaccgcaaccgacggatatttcaaaagcgactgatgcggatgtgatttttcacaacgggttaaatctcgaaacgggtggcaatggttggtttagaaaacttgttaagatcgcgcataagcaattcgaaaaggatgttttcgctgctagcaaggggattcaggtgcaacatttgacaaccaaccaaacagaacccgatccacacgcatggttggatttggcgaacggtattcaatacgttgagaatattacgaaagcgctgcagaccaaagatccagcgcacgctgatgattaccgcaaaaatgcagatcgctatactgcacgtttgcgcaaattgcatactgatgcgcaaactaaattcgccgatattccagctaatcagcgggtcttggtgacttcagaaggcgcctttaagtattttggtaaggcctatcaggtcacaccggtttacatttgggaaattaatactgagtcgcaaggcacacctgaacagatgaagacggttctcgcaaaaattgcagattcagatgttaagcatctgtttgttgagagttctgtttcgccgaaatcaatggaaaaagttgctcaggaaactgggttaccaatttatgcgaaaatttttacggactcactcgcgcaaagagggaagcaaggtgacacttactatacgatgatgaagtggaacctagataagattcatgatggcttagtcggtcaataaaaagataatttttagcaattaaaaaagcgggtgctcagacaaaaataaatttgtctaagcacccgctttttttgtagttatccttgttgagaaagggaacggcgattggcgaagggaacgagccgctttttttgttttaagaaccgttgccggtagtaacgatattgtggcgtgaatggatgggaagatgaggcgtgccatggcttttcgtgaccacagaagtgaacaagcgcaggttctttttgggtttctaagaattgttttttgaggtgttcagttggtggtgtaatggtgttcatcaaaatgtttgtttgggcattccacatagggtgaaggtgaatccaccgatcatgcaaaattgcatttaaagcatcttgatcgtggaagcgtaatttctcagggtgctgattgatgaagtcgagtacacggctgacaatattgtgttgacgccattttttgagattgagtaacatcacaccggagttaaagtaacgcggactttggtaatcgatagccattttttctaagcgttcgtggaacccagcatcttctactgcagcgaggaaggattggcctaagtcgatatcccatagccgggctaaatctgtgaggcatagcgcatcgcaatcgatgtagagtgcacgatcgaggtgagggaacacgtcgggaattagaatccgatagtacgccgttttcaagatccgatcactttcaacagtattggccagtaaagattcgttgacctctgcaaaggtcaagtcggcatcaaatcgagccacaacatgctgtaagactgctttatctcgtgcggtgaggtggtcttctaagacgtaaaaagcatagtgtcgatgtgagtcattgtgattaagaattgaggcgtatagaattgccagcgtttcgatgaaatcggaattgacagccgatacaatattgattatatcggattgttgcgcatgtaattgtttgagttccttttgatattggtttaagaaggggtgactttttagagtgttccaaggtttctcgtgtgttgtgaagtgaacaattgccgggttggcgattgcttcatcaaataaatgggcatattcagtgttgataggcgcatgttttctaaagagcaatgagttttgtacgttccatttaggatggagtagtttcactttaccaaccaaagtggcatttagcgcatcttgatcatggaattgtaagcgatccgcatgatgattgatgaagtggaaagtccgctctgtgatggatgcatgattccaccgaaccgtatcaattagcatgacccctgaattgaagtagatgttattcgattgtggtggggtgatgccgagccgtcgcagtgtgagtgcttgtccaggatcaatcacggcacccacgatatttgtgcccaaaggcgtattgtatagcggcgtgagatcagtttgtacgaggatatcgacatctaaatataagacacgttcgattttttttcgcaacaaaagagttggcgctaaaatgcggtagtaagccgttttgttgatatggttgctttcaggacagttttcaaaaagctgcttattaagtgcaataaactcaacttgattggggcgtggaacgcgcttggaaacagcgtgtttcgtttgcggagtgagttcattatcgagaataaaaaaattaatagtagttttgggcgaaatatgggttagagccgactttacggcgattaaaagttgatcaccatagttttcatctgcggcaaacatgatattaatagcgttgataataaccatctccttttaggtgttgtgtctttatttaaacaacttcaacaatctttgtaaaggtaaatgattatgctaacaataacaaaacgtaatcataaaagttgcatcaataaatgtgattgttttatattgatggtgtagcgttattaaagatttcatgaaaggaaggttgcttatgcaaaaagaagtccgaattaggaaagttaggttaggtcgtagtacagtcaagaccccagaattgtgcttggtgattaagaaagaatcagccaatctaaagtgttttctagaaggtatgactgatttggaggaagcaattttaagagagaataacggtgaggccctcgtcggtgagagctgggggccattggaatttgatcatcgtggtcgtgtttttagtaacaagacggtaaaaatgtgtcttcaaaaattggatgataatcaatgatcctagcagccaaagtggttgattagagaggatgagtcgatggtttcgcgcatattaccaattaaaaatggctacaatttcagagaactaggtggctatcaaacactggatggtcgctcgattaaaccgcatcgattattcagaacggggaatctggcgaatcttagtaagagagaattggtgctcttggagagctaccatatcacctatgtcgtggattttcgttcaccaatggagcgcaaaaaagcgccagataaaaagattacgacggcatcttacgaatcgttgccaatttttaaagaagatgcgacgcaaagtacggcgagtgaagcggaactttatgagcgctacaccaataatccgcttggtgggcagcaacaaatgcgccaagtctatcgagaaatggtgcaagatccctattcaatcggaatgtatcgccaattcttcgaacgattattgactgaagccgatccgcaacaagcagttttatttcactgtacaggtggcaaagaccgtaccggaatggcggcttattatttattaaatgcactcggggtacctgaagatgtgatccaatatgattatctattatcgaatacagcatctagggaacaggttgcagcccgcattaagacgctacgtcaaaaagatgcctcaagcggctttttaaaaagtatgcatgcattgatgagtgttgatcagtcctacttaaacgcagctgagcgcataatcaatgaggattatggttcaactcaagcctatttacaacaggccttaggattaacaacgcaggacattgaacatttaaaagcagtgtatctagattaattggaaaagagggaacaagaagatgggtaaaccagatttaaaagatccgcgaacactttatcggacagagccatttcaagaacaagaacaagctagtccggcattgcaagatcaaatgcatcccaagccagattgtggcgaagaacactaccgtggtgcacaacggttactagatcgtaaagtgctgattaccggaggagattctggtatcggtcgcgcagttgcaattgcgtttgcccgagaaggagcagacattgcattgcaatatttgccaggtgaagaagtggatgcgcaagaagtggctcaattggtgcgagatgcagggcgtaaaatcgcattgatcccagctgattttcggaaaccacagattgctagccaagtagtggaaaccgcgcagcagcaaattggcacacttgacacattagtcttaaacgcagctcaacaaattgcgcatccatcaattaccgaattaccaatagaacaagttcaagatagttttaacgttaatgtggttgcgatgtatgcgcttgtgcaagcagcattgtctcaattaccggctggcggcagtattctgacgaccacttcagtgcaagcctttaatccgagtccgcatttgttagattatgcagcaacaaaagcagcaatcaagaattttacgatcaatctagcgcaacaattagcggataaaggtattcgggtcaacggggttgcaccaggtccgatttggacaccgttgcagttggctcaaggacaactggaaggggctttgcctaagtttgggcagaatacattgctagaaagagccggccaaccggcggaattagcaccgctatatgtttttttagcaagcaacgcagcaagctatattaccggtcaaatttacggcgttaccggtggcgaatcaattaattaaacaagtgcatttacgataatttaataatattgataagcgtattgttttacggatgctggttgaatttgttacatttatggagaaccagcaatatattttaaggaaacaagaaaggatgattgttatgttacattggttatgggttttaattattggcgctttaattggggtgattgcgggggcattaacaagtcgtgatttacctgcaggttggatcggcaatatcgtcggtgggttagtcggcgcctggctaggtcaatcattgtttggcagctggggaccacagcttgccgggatggccttaattccatccattatcggtgccgtgattgtcgttttcgttgtttcattattattcacacgtagaaaatcctaatacaaaggggcggacaccatgaataaattaactaaagtggtgatcagtttagccagtttgcttgggttgtgtcaggtagcgtggtttatcacattaatctatccactacaacaatccaataagcaatttatgcatcttagttggctacccgaacaatgggtcggtaattttggacttggattaggggtgcttagcggcttaattttcttatatttactgctattggcattattcagtccaccgaaaaaacgccaaatgatcatcaagaccgataaaggtgaactagcactttcccgcaaagcggttgaaaaaacagtgacacaagctattattgaaaaacaccgtgttaaggaagtgttagtccatacgacgtttaaaggccgacatccaaaagtgactgccgacgttcaagcggtcgcagtggatcgcaacgatctcgatcaacaagcacgggcagttaaagaaacggtacagcaagcattacaaacaatctttgagatgccgattaaagcagtgaatgtcaaactatcaccgctaagtaatcaggcaaaaagtgatgtgaggtgagacaaatgagacgttcttattggggctttgttgttggggcagtgttggcagccatttggattagttttggatttatgagtttaatcttgattatcatcgctggtttactcggctacattgcagccagtttaacagggtctaaggaagatctagaaggatttagatcacaagttaaccgggtcttgaagcaggataaataacggaggtgtgacaaaatggtagaacaagcacatttagatgaagtgatggccaatagcaaattgacttttgaagatgctgtaatcgccaaaattgctggtaagacagcgcaaaacattgatggcttattatcgatgaacggtaatttcttcagtgatattgcggatcgttttagaaacgatagtgatccaacgaagggcatcagtgtggaagttggcgaaaaacaggtcgcaatcgacatgaccattattttggaatacggccggaatgcacgggatgttttcgaacgattaacagctgcagtgactgaagctgtcgaatcaatgaccggtttgagtgttgtcgaagttaacagccatgtcagtgacattatgactaagaaagaatggcaacaacaaggcagtaatccaaagaaaagtgattctgaaaagcgcgttcaataaaaatagtaaaggatgatgaaaacgatggataaaccaaacaaaccaatggataaaatgatggataagacaatgaatcaacataccgaaaaaatcgaaaaagaattgaacttctcggatggtgtgattgaaaaaattgcgggccaaacggtgcatgacatcgatggcgtcttagaattatcaggcgggatgatgagtcaattagctgatcgtttcagagaccaagaagatccgacaaagggcgtcgacgctgatattgataaccaagaagtaacgattgaattggatgccatcttggaatacggtaaatcagcgccagacatcttcgaacaaacaattgaacgcatcgctaaatcagtacatcaaatgactggtttaaacgtgacgaagattaaaatgaatgtctctgacttgatgaccaagaaagaatgggcagcaaaacaagattctccaaaagaagataaataaaaagaaggtatccggtgggccggataccttctttttgtatagattagtgttcaaattggtttaaatctaaatttaatgccgttgcgactcggcgaccgtattctggatccgcttggtagaactgtttgacttcgcggatttgaatttcaggttttgtaacttggccgagatttaagcgaatgttttcgattagtcgatcttgttcttcatcagttagtaagttgtaaagcttatcggctgctgaatagtaatcgggatcggctggatagttaccggtttgaccgctaagttggtcgccatgaattttggcagatgggacttcttttggaccatcttcactattaggttcatagttgacgcctgtctcttggttttttgccatgatcccgtcgcgttcgtaattatgcacgggcacttttggccggttaacaggtaattgttcatagttggcacctagacggtaacgttcagcatctttataaccgaacaaccgtccctggaggagtttgtcaggggaagcttcaatcccaggaactaagttagcaggtgagaaagccaattcttcgatatcctcaaagttgttggttggattttcatcgagtaccatttgaccgatttcgattaaggggtaatccttttgtgaaatgaccttcgtcacatcaaagatatcttgcggatagtttaaaccagcttcataaggaacaagttgaacggcaacggtccaacttggatggtcgcctgtttcaatcgcatcgaataaatcattttgtagataatctgtatctttaccagccaattcggcagccagttcgttacttaagttatggacgccttggtttgtcttgaagtggtattttacccagaactgctcaccagtagcattcactcatttaaaggtatgactaccgtagccatgcatcatccgatagctagcgggaatcccgcgatcactcattaaaatcgtcacctgatggactgattcaggtgaaagtgaccagaaatcccactgcatgtcttggcttctcgcgtgtgttcgtggatctcgtttttgggagtgaatgaaatcagggaatttcagaggatcattaacaaagaaaacgggcgtattattaccaacaatgtcatagttgccttcttcggtatagaacttaagggcaaatccacgcacatcacgataagtatcgggatagccggcttcaccagctacttgtgagaagcgcgcaatcattggtgttttcttaccagcaccactgaaaatggctgcctttgtgtaggcgctcatatccttagtgagttggaagtaacctttagcaccggcgcctttagcatgcacgacccgttctggaatccgttcacgattaaaatgcgcgagtttttcgagcaattaataatcctgaattaaaacgggaccgcgttgaccagcagtttgcgaatgttgattatccgcccacgtttggccctcattagtcgttagtttgtttgtcatgtaaatagcctctttcattgcactttgtgcccagagagataagacagggtcaactcaactatattatttctcagcgaaactgcaatattattgcttgtgcaaaaagccactaaaaaacggtttacaactaataaaattagtcgtaaaccgtcatgttatctgctgatgagacgcggcttaatgtattgctggtataaataagcagccccaaaaaagtaactagttgccagtaaagtgacgagcggcaaactttgaaacatttggtgtgggagaataatggccaataaagggaaggcgcaggcggcgggaattctgacttgtagcagatagagtaatgcccaaactagtggcagtgcaattaaggttaccaataaccgtgaatcaagtaagctataagcgacgaatccgattgtggcggcgccagttaatgcaaccatctgcttgatggccattttacctggatacattggtttttgtagaatttcaaaaaagacgacaagtaccggcggaatggcagccatctgtggccggccgagtaaactaacaactaacacccataagagtgcaatgattagaaaaaccagcatgacgcgatagttaatcgtggcatgatagggatgttgcagatgcaatttgcggaggctaacgaccaacatcaaagtgagcgtaaagcctaaaattgcaatgatgaatgaaagttcagtggcgttgacgataatcggtaacagccccgttgcaaacgatggtgcgagtgttgagcgaaataaacaaagtaaaacaatcatgatgagtagtagtaagctaattttaactgcataactgagcggcaaccgattaatgccaaacccaacgatggcggttatcgatggcagccaaaatatcttggcgggttgattgagccaacccggttcgtgataaatccacagccccgttgttaaggctgcgatttcgggtagaataatctcaacatcgttcaagacagtggcaatgcccaccatcaataatacgaatccaaagccgagtaagtaatccgatagttttaatttttggggtttcaaaagataaatgactccttagtgtggtttgagtaatagtatttattatacgctactgaaaaaagaggacaactcaaaaaagagcgtttcaactaacgaatagctgagaccgctcttttttgaattaaataattattagtcgttcaagttatagcgtaatttcatgtgttctgagcctgaaatcaccatttggccaagtagggctgtttggcgtttaagtgattcgctggctaatttgttattagcggcttccaagaaggctgcagcgtctttttgatcagtgaaggccttgtcggtttcgttttggatcacgtgataggcactcattgcttcgagttcgaaggtgttacgcatatcaacgtagaagtcgtaatctgtatcgccaagtaaggcggttgtacagcttaaccagtacatgttgttcaagtcaaaaatacctgtggcattcttgtatgattctggtgtgtcgttgatattcgtgtagaatggcacgacggtgttaaatgtattggcaccataagctaaccattgaataccggcaatttcagcaggcacgttgttgcgcacttgtaaaatatgcatgttgtgattccggttaattccgattggccggaaacgagttttaacatcttcaggggcgctaccgtaaggatcgtattctgtattttcaaagtgagcgctcaagacgaacttgacgtcttcgattgaaatcttgcggttggcatggcagatgaatggtaaatcttggtccattggatcttgtttgatttctggattgaagtattgttgaccgtaccatgttcgtgggttgttataaaccgtatctttgattgaagcactgccgaaaatatgacggagattgtagccttcaaagtcaggatttaagtggttatcatcaattaaagcttttaaatcagctgagcaaagcgtgtcggctgaatcaaagtcgaaatgattgatgttcatccggttaggggcaaccacgtatgcatcatcagggatgcgaacagcagcccagtgatgaccaccgattgtttcaagccaccaaacactgtctttgtcagaaaaggcaatcccgtttggttcgtatgtgccgaattcttcaaggagggcgcctaaacgttcgaccccttcttgagcactgtggatgtaaggcaagactaatgtcacaatatcttcttcaccgatgccaccagggacaaaaggatcaagcccttgaatccgggggttagtggtaatcgtttctgtggcagacatcgtgatgttttcactgttaatcccagcagctggccaaatcccgttcgtcaataatgagttaggaattgaggtatagcgcattgggttatcaggcaattggatttgaacgccgctaatcaccgcttgataattccggggttggtcttcaggattgaccacaacaaagcgttgtggatccaaagcttcgtggccatcatcatttctagaaatcatggttgaaccgtcgatggaagcttttttgccgactaagaccgtggtacatgaccctttaattggtttttgcatgtcaaaacactccttttatttattatccatagtataacgcttttggcgggaaagtgggggattgagcgataatcatgtgaaggaattgtttaaatgcaagtggttgagggtgccaagtcagttatcattggtattcaattcgttggtatcaacaaaaagattcggatgagtcgtcaacgtaaagcacaacatgcaactaatagggctgaacaacatgccgaaaagaaggccatacaatacagccgttttcagcaacaccagattaagaagcgggaaaaacatcggagacattgaaaaagaagaggtgggggtaatccgcatctcttccttttaatatcgtcagacaaaatatgaggtttagttaaataatgatatactcgatttgatttaaaggaaagaggggactaatgctgaagttagccgattgtttattagtgattgatctccaaaatggtgtctgcaaaagtgagcagcctgttgcgcgtcttaatcaattaattaaaggcgttaatgccagaattgatgcctatcaggcggaaagtcgcccgattatttttgtccaacataacgataagactttgattgctggtcagtcgacttggtagataatgccagaattgaatgtgcctaaaacggcaatctttgttcaaaaaacgcatgcggattcattttggcagacaaacttacaaacgttattgagccaaatgcaaatcaaatcgcttgaaatttgtggtgcccagaccaaatactgcgtcgatacaacgattaaagttgcccaccatttgggctaccaactccaaatggtaatggaccttatcatcacttaagaggagtatctattaatgtcaaaaacagctttaattacaatgcaaccaacagaccaaacgacagggacaacggtcatttacgcgccagataatgcggccaatcgtgtgtgggctgctaaacagtccaacgtacaactgatttcgattccaggttatgttcgttttggcgatcatatcgttaattttttcgttaaaaaaattgtgaaacaaggcgatgtttcggcatacagtaatatgttacagtttgtttatttttcacacatgatggcttacaacgtggcaaatacgccagttgaaagattagtttttgcaacgcaaaatctagcgactaaagtattgatgcagtttgataatcaagcacgttataataatcaaatgacagtcttagccaaataattatagaaaagccccgctcagatgagcggggcttttctataattattgatttaattgctgaacataagcatgttgttcaatcatgaaattaatggcaaaaacagcacataaagcgtatagaataccatcaattccagttggaatatgtgaccaaataacatgtgggacaattaaaattaaaaaggagagcaagccccaaatccaacggttaattaaaattccgtgctgatttaaaaattttaataggtattggcaaccaattaagagtattagaaaacctaaaaatattaaaatccaatagagcatgctgagttctccttttatgcagcttctgccgctgctttagattcatctgcaaccatttttttatcatacgccttgatgaatgggtagtaaatgatagttgcaatgacaaggttaacggcaattaaaacaacaatccgccagtcattcccagcactaaggaaaccaccgattggtgcgggtaatgtccaagcttggaatgttgaaaagccattcacaagatgtaatttaattgcggtgtatgaaacggttgttaaaacaagtggtacaacattgaatgggatgaagaggtatgggttaagaatcatgggtgccccgaaaatcattggttcgttaatattgaaaattccaggaatgattgagaatcgtccaacttcacgcaggaattttgatttgcaaattgtgatgaagagtgcagctacaacgattgtagcgccagcaccaccaattgtaacagtccattggtagaattgttcgggtgtcacgtaaggaagatgcgttgctgatgtacccgttgccaatgcttttgcattatcgtcgagcatgatgagccacattgggcgaacaacggaaccaacaatactcattccgtgaatcccaaatgaccatagaatatgaattaagagcattgggagtaaagcaccaaacaagttgttaccaagtacgccggtgattggtttgaataatgcgagtaaagcattatttacatcaaagcctgcaatgtcgcgaataatccataatgtcactaagatagttgcgccaggaataagtgcttcgaaagaacgtgcaacagcaggtggaacttgttcaggcatcttgattgtaattttatgaacggagaagaagcgataaacttctacagcaaaaatcattgctaaaatcccagtaaacattccactagcacccaagctccccattggtaaaacgaagccgagtggtttgtctttaggtgtaagaacgttaacgggcatttgtagcatgaagaacgcaccaagggataaaatcccaccagtagttgagtctaacttatatgattttgccaagtcagatcccattacaaaggttgcgtagattgccattaaccccatcgtcattctaaatggtagagcaattgtagcagcgtagggtgttagtaaatcggctaatggtttatacggaatgttaacaaaaattaagaagaaactaccaattaagattagtgataaagttgagacaaccccatttctaatggctaataaatgtcgttgtgtaccgactttagccataggcgggacgagtttttcctcaacccatttcataaatttttccatggttaaacctccaagattttatttaaagcgcttaccattatattagcacatagaaataatatttcaatatataaaattaaaaaaagataatgaaatattatttcagagatttcttttgtgttgttttgataatttctgctgatttaccgagtcgttcaatactttgatcgtagttatggctgacatattcataaaaaataatatcaacaacagtaaactgcacaagtagggaattggtcgcggcaattcgatctggaaactcaattggttgacttgtgtgaacagctatcgtacttaatttagaaacactattattccctgattgagtaagagatagaatggggacgccaacttgattagcaatttttccaacttgaatggcatctgatgactcaccagagttagaaatgatccaaattaaatcattctgattggcgtttactaataagggaagtaaaccatccaaatcattaaatggtgtgacggcaatcccgattcgtccccatttttgagcaatgtttagtgcagttaagtaggaggcgccaatcccgaaaacgattaaatttctaacctttgataattttctactaatcatttgtaattgctggtcatcgagttgaagaactgtttcattcaatgaggtttgagcattataaaggagcttgtctttaattgaattaacttgttcgccttttgtaatatctggatgaaaagtatttgtggtttgtgttaagtcagcagctaattcaattttaaggggtgtaaaaccatccacattaattttttttccgagtcgaatgacggtggcagcgctagtttcagattctgaagctaattgctgcacagtcatctgtagaacggaatccggttgattcatgatatagctagcgacttttttttcagcacttgagaaaaggctgtaatgtttcttgattttggcaataataggcatagttgtctctcatttctttaagagtgcagcgatagcgagtgctacgcggtcatcattgtttattaaagcagtaactgctgattgataatcaacagttgcgctcagcatcacaattgcaacttttgcagattcgtgtgcttcgaagtatgctttttctgcaacagcaactgttgtacctgttgcttcttgaataattgactttgcacggatttttaatttttgatttgttggttttaagtctaccatgagattgccgtaaactttcccacatttaatcattgtggttgttgaaagcatattgagcactagcttttgagcagttcctgctttcattcgagtagaaccggtaacgacttctggaccaacgataatttcaagtggtaaatcggcatgctggctaatgagtgcatctttattgcaagtaattgaagctgttttaacacctaaagaatgggcgtaatctaaaccaccaatgacgtagggggttcgtccactagcagcgataccaattaagaagtcaccaggttggaaatgctggtttttaagatcctggacagctaaatcagcattgtcttctgcaccttcaacagcttcgtacattgcttgttgaccaccagccataagtgggacgaaacgatcaggtgaaacgccataagttggtacaatttcaacagcatctagaacacctaaacggccactagtaccagcaccgatataaaaaatgcgcccaccatttttaaaggtagtggtcatttctacaacaatcttactcatttgttccaataattcaggctgattgattgcgtagggcacactttgatcttgttgattaattaggctcaagacatcaagtgtatcgagctgatctattttaagtgtttctggattacgttgttcggttgttgaatacattataatcactccattatttttttaagggtaaccaagcgagtgcttggtttagtgcttggttccaaaatagccagtcatgtcgacctgggctaaagacaactttactagcggggtttaaagacactttgtctagaaaatgttgattttgttgaaataaaaagtcatcagtcccaatcgtccaataaataggtgtttgagttaacttaaatggttttgttaattgataattagttaaaggtacatctaagaaaacatgacgataatccggcatcaacgatggtacgattttcaagtcaactaggggagataggacgactgcagcttgaaaaaaatcaggatatgtgttgagccatttgagggttccaaagccgcccatagaattacccataatgaaatgatcttgggattccggagataatggtaatagttggctgaggtaggtaggcaaactatgcgtcaaaaatgagaaacaagcttgtccatctggttgatcaatgtaccaactacgaggaagagaagggatgataaccgctacctgataatcggcaactaatgtttcaaggtaagtttttcgttgccaagcactaccgtcatcacctagcccatgaaggacatagagcgattgcaatggtccggtaattttatccggtagcataatcgtgattgttgtttgattatcaagtatcgtgtcgttatatttaagagtcattagtgcgatagtaaggaccacctttgttctgaaatataaattcaaagtatataaaaagttgaaataaaatttccgtctggttataatgtatccgtattcatgaaattagtcaagctctgaaaggagatacttattatgcaatatcgaattgggatagatagtggtggcacccatgtggaagcagaggcttgggcagaggatgggacgttactaggaacagcaagtgctggaccaggtaatagcttattaaactacgaacagactcttgttaatttagaaacagttattgaaacgttacttaatcaaaataaagtgcatgaatgccaattgattttagcgggcgttgcaggtagtcagagtgcaaataaccaaacagcaatagaagcatatttactgaaccgattctcaatacctgtaagaataatttcagatgctgatttagcaatgttgaaaggatttgggtacaattccggcatattagtgattgcaggaacgggttcaattgttttaggacaagaaggccccaaacgatatcggattggtggctgggggcatctattaggcgatgaaggaggtgcatatgacattgtcaaacgttgctatcaacagatgacacaagaattgaatcagcagttagaaactggaccgatgacaacgttaatcctaacggctttgaattatgtatcaccaacggaagcgattagtgatttttatcaaatgtcacggcagcaaattgctgcacaagctcgaatattagcggaacaaggtcaaaataatgaacagtttaaaagtgtaattgaggtatgtgctaatcagttagcgcaacaaattcaattaatgcgggagcgttttttaactgataaaccaatcaaaatcgctttaaccggctcagttttgacgcataatcaattattaaagcaccgtgtagaggaacaagtggctcaaaagagcacggttcaatttgtaacacttgagggcagtaatgcggctggtgtaaaaaattttatcctggaggatttcaaatgacttttcggcaactaggtttatccatttatcctgatcacagcattccacaagaagacgaagcgtatttaaaattaggatgccaatatggtttttctcgtctattcatgagtatgttagaggttggtgatattgcagaaacgaaagcaaaatatcaacatattatccaagttgcgaaagatttgggttatcaaacaatgattgatatttcaccacgtatttttgatcaattagggattagctatcaggaactcggtttttttgctgaattaggtgttgatgggatccgactagatcaaggatttgatgggagtacagaagcccttattagttataatccatatcatttaattattgagttgaatatgagtaataatgttgcctatttggataacattttaagttatcaagcaaacgaaccatacatttttgggtgccataatttttatccacaagtgggaactgggttaacagtcccgttctttcttgcatgtagtgagcgatttaaaaagcatggtattcacactgccgcatttgttgcaagtcaaaacggtgatcagggaccatggaatgtaaatgatggtttaccaacacttgagaaggaccgttatttaccaattgaatctcaagctaaatggctatttgcaacggggttgattgatgatgtcattatcggtaatgcttacgcgagtgaggcggaattgcaaagtttagcagcggttaatcgttatcaattagcttttacaccagagttgatgccagatattgcaccggttgaaagggaaatattgtttggaatgcaacacttcagaagaggggatagtaatgcattagtcgctcgttcaacacaatctcgtgtgatttataaaacaacgcctaacgcgccacatgattcggaggaaacgttccaaattggtgatattgtgataggtaatgatcagtttgggatttataaaaatgaggttcagattgtccttgaaccgcatcaagatagccgcaaaaataaagtgggacgaattaaaccggaggaattagatttattagaaatgcttcagccgtggacaaaatttaaatttcagactaaataaatgaattgataaaaaggttgctcgtaggagtagcctttttattttgggtaaatcaacaagaggtaacgtttttaaataaccgtttacattttactaaaagtttagtaaaataagattgcaatctaaaagaatgcgtttacaggatagttcttgtacagattgatttatttgtatggtgtaaatagtaaacgtttactaactaaaagagaaagaagcgactaggatgaacgacaacaaaattattatcgatccagaccaatttgctgcagcaattatcgctgggaatcccaagcaaacgaatgaagacaataaggtttatatcaagcgtcaattgacgttatatctagaatcagttttactcgccaacgattttaattcattggaagaaaaccaattcggctcagccaaagaaaagcaacgccaagcgattttggaaaaaattatcgaacatcgctatcactagagtgcgtcatcaagcgggataacccgagggttgtgcttgatgaaagcatgtttacaatgaagaaactatcgaaaggaatctaaagaaatgaaaaaactaaaagatgttaaacagtatagttcttacgcttttggggcctttgggcatgatgccttttatgcaacacttagcacttattttatgatgttcgtcacgagtcaattattcgataccaaaaatgcaggctttaattcaaaaatgattgcgtatgtcacttatacaatgatggtcattcggattgttgaaattgccttcgatccgctgattggtggagtggttgataatacacggacgcgttgggggaaatttaaaccgtggttactggcggggtcaattattagttctgttggcttggccatgatttttaccaactttggggggcttgcgacaagtagcccttatctttacttagttctttttgcaatcgttttcgtgattttagatatcttctactcgtttaaagatatctcgttctggtcaatgttgccagcgttgagtgttgattctgaaaaacggacaaaattcggggcgattgcgcgtttcggatccactttaggtgcacaaggggtcattatcgtgattgtgccaatggtggttttcttctcgcaactattttctgggagtcatgggagtgaacaaaccagtgccgggtggttcggttttgccgttgtcattggccttgtttcattcttaggcgctttagcgaccatcttaggaaccaaagaagaaaagagtgctattcgggaaaatactgaaaaggttcggttacgtgacgttttcagtgtgattggtaaaaatgaccaattaatgtggttatctctttcatatttcttatttgcctttagttatgtgattacgaactcactgcttttatattattttagatatgtcatgggccgcgccgcagcgttctcaacggttggtgtgattactgccatcttagggattgtgtcagttgcgttgttcccaacattggttgctttaattcatcgccgggcaatctatattggcggaatcgcaatgatgatgcttggttatatcctcttcttgtttgctggaagtaacttggtcgtagtcttaattgcggtcggcttattcttcttcccatatccactggtctttttggctgctttgatgacgattaccgatagtgttgaatacggacaattgaaaagtggtacacggaatgaatctgtaacattggcagtgcgacctttattggataaactagccggggcttttgcaaacggcgtcgttgtgacggctgcgattcatgctggcatgactgggaatgcgaaaccaagcgatatcactaacgcggggttgttgcaattcaaaatgtacatgttcttcattccaatggcgttattggttatttcagcgttaatcttcatggctaagattaaattaacggaagcaaaacatgctgaaatcgttagtgagttggaacggaaattagattaataacaaacaaagcgtagttagtctatgcttgaaccagaggctgcatcaaaagtaattttgatgcagcctttttatgactgattagtttatgggcttaacttgatgctgagaatgccgatgacttcttggttaacagtgcccaattatttgaaccagtcgtcggtcagtcggtagattgggtgctattcagaactaaaatcgaaagagccggcggaacggattctgcttttggtttgactgaagatggtgactatcaatacaagacggcaaaagggcttttttagactactattatcaaaatgtcttctttcaatcatgtaataaattgtatcgaagagcgattattgaagctgaagcattgcggttcgatgaatcgctgcgtatcggtgaggatttaattttcaacttgcagtatttacaacattgccgagttgttaggcatcgggcagcgtttttatatgtttacgagatagggcatgctgaggcggctacgagtaccctaaagccgcagtggttctcagttaacttaacagctctgcacatcattgagacgcaattagtggctggaattgcagaagtggatcgcgcagcttacacacgatttttaaagcagtatgtgcggaccttttttagaatgttaattgtttttgatcagcgcacactgactgttcctgagcgacaattcattcagacgcaattgatcaatttagaacgtggtttaccaaccggcacatcccggtggctacgatggcttaatcggtcgcacttagcgccggtcatgctagttggcttgcgtcggttaaagcaaaggttaaaataaaatgctgtccgccagaatcgaacgattcaaaagggggacagcatttattggttcatatctaaaaaaggatgcggtgggcgtttaaacaaaggggaattgactgtgaaaaagatcagtatcgtgattgtaatcagtagtattgttgtgattagtctggcgacgctaggtttttatttgcatcaagaggataaagctgttgatgcgattaaaaccgggtctagtcgaatttcaaaacaaattgatcagcgaaagccaatctcgttcctattattaggcgttgacccaggcgcggatgggcgcgttgatcgtggtctgtcggattcgatgatggttgtaacacttaacccggcgtaagaagcaacggtggtctactctattccgcgtgattcattggtagagatggcagatgaccacggcggtaatattcagaaaattaatgcggcttatgaaattggcaaggctaagatggcgaaaaaaacagtcagtcagtttttagggctcccgattgactactcggtgacggtcgatatgggcgcactcaaagaattggttgattttgtcggggggattaccatcgatacggtgattgacgttaatttgaatggacaagtgattccacaaggccaccatcatctcaatggtgatcaggcgcttgcttatagtcggatgcgttatcaagatccgcgcggggactatgggcggcaattgcggcaacaagaagttttgaaacaagttgcgcaaaaaattcaaaagccaaaatatttgatgaacattggtgacttaatgactaagcttggtcagaaaattagcactgattttacagccgaccaagtgaagcagttgattcgcaactatcatcaaagtagtggtgaaattgtcagcagccaattgctaggtaaaacggcgtggcttaacggcagtgcctatcaaatcattagtacagaagatttgcaggctgcttcgaattggctccgtgaaaatttagcactgccggaacaaacgttaaccaataccgaaacgcgacttaatgatatgaacccggccttttttgatgatgagtcgccaacgacttacttcaacgtgcgcggatataacgtgacacggtatacaaataatacgtattagtgttgtggtcgaagtgcgtaggtttgggtggcgatggcgttaacgaaatcaacatcatgctcgataaataggagggttgggcgttgctcggcaattagagtttgaacttgttcacgcgtgatgacgtcgaggtaattcaacggttcatcccagaggtaacagtcagcctcttcaaagagcgaacgtgccagtgcagctttacgtttttgtcccatgctcatcgtttctagacggtgggtaaataaatcgcggtcaaaacccagtttgcgtaacatgcttagcagttgttcgtgatcaacctgtttcgcagcagcgaagtcggccagtgagccgctcagttgatcgaaatcttgtggaagatacgagagggttaagtgcggattaaggtgcagactaccgctggcaatgtggtcagttgcgggtaatgcaagtaacgccttaatcagtgttgatttacctgcgccattaatcccagttagggcaacctgttgaccagtttctaaggtgaatgagagtggttgattaaggatgacgccgtcttgttgtaagacaagttcatcaacactaagcacattttgaccgggtttgaggggtcgctgattgatggtcagtggtgcagcaatttcaacgtttttaaaaagttgttgttttgcttcgattgcttcttccgcgcggttggcaattgtcgtcgcccgtttcataaccttagcggcgcgatgactgatgaagcctttatcgagattggcactttcagttttgacactggcggcgtttttccctttttcagcttcgtgggaccactgcgctttttgttgtgctgtttttgtcagccgtttgatatcgcccttgagttgttgattctgttgttgctcataagcagcttgttggtcgtgggcggtttgccaagtttggtagttgccttggtgaacggtgatgtcggcacgattaatcgctaggacatggtcgatcacttggtttaagaaatggcggtcatggctgacgacaatgaagccggctttttggcgtaaataattggcaacgacttggcggccttcttgatccaggtgattggttggttcgtcgatcagttgaaaatgatagtcgtcgatgaatagtaaggcgagtaacattttggtttgttcaccaggacttaacgaagcaaatggttgccagacgatttcgggtgcgacttgtaggagccgcagttcccgctcgacttgccagaaggttgaattgtcgaggttacctagctgcattagaatatcgcgtgtgagttgcgtaggttctgtaacagtctgtgggaaatattgaaaatcgagattggtaaccaactggccatcaaatggtagttggtgttgaagtaattttaataacgttgttttaccgcgaccattgcgcccgattaaaccgagtttccaactggcgtcgaattgaagcgtgacgtgatcgaacaacggttgtgtttgatctgaatagttaaatgtgagtgctttgaattgaattgtgcccatgaattatcacctcattgattgaatgagattggcccagttgtcgttaaaaatgcacaaaaaaagacgcaataacagcgtcttttaacaagtctttaggtaactgacctgaaaattaacgcaagcaatctctaacggcaatcggaaataaacggtccacgcacgtgcatgaacagttcgtaccaatcgagttgtcagaaaattagcatgcgattttcaatgccagtcacatcctttgaataagttaaatttgattctagcagattatttttagaaaaacaacttttaaaataatcctttacaaatagatggttatcccctatactaagtaactaattaataacaaggagggtctgtcatgaattcaatgcaacgtgttgcctttagctttttctttaagatacccagtaatcgactggttgattaaggagaaggcatttgagttgaaatgacaaaccttaatgaattggaagatggctgggtaaccccgagtcatcttcctggtggggctcactagtgaagactagtgggctcctttttttgttattaaatgagtgcgacgaagcctggttagatactgagtaatagcatagtccagtgaataaagctgggttgtagctttgtttactggacgtagctatacggaagtatctggctgaggagcacgttaagaaagaagtgcgacttgaacgatttggcttcgagcataacctaaaaagcgcaatggtgggcgtacgaccgccattgtgattctgtagttaagcgcagaaggcagttcaaggagcacgttaaagaagtgcgacgaagcctggtaggcggcgagtaatcgcctagtcgagtgcatacaataaaaataggagtggttaaaatgggattaatggcaaagatgttacgaaaagaatcactggaacgttatttacaacaagatcagcggttggccaaaacattaacggctaaggatttaattgcattgggcgtgggggcagtgattgggaccgggatttttatcttaccgggaacgattgcggcgttacatagtggcccggcaatcacgatttcatttatgattgcggcggccgtttgtgccgttgcggcgatgtgttacgccgaattttcatcggcattaccagttgcgggaagtgcttactcatatggcaatattatttttggtgagttaatcggttggctgcttggctgggctttattcttggagtatatgttgtcagttgcggcagtttcaactggttggtcggcttattttgtatcatttatcgaagggtttggcatccatattccgcatgcaattactggcccgtttgatccggcacatggcacttatgtgaacctgtttgcgatgctggtagtgggcttgattgcgacattattaatgcgagggactcgttcatcaacacgaattaataacatcatggttttgattaaattaggcgtagtgctacttttcattagtgtcgggattttctacgtgaaacccactaactggcaaccgttcatgccgtttggggtaagtgggattttcaaaggggcatcactcgtcttctttgcttaccttggctttgactgtgtgtcagcatcggcggcagaggttaagaatccacaaaaaaatcttcctatcgggattattgggacgttaatcatctgtacgttgctttatatattagtggcgtttgtcctcacagggatggtgtcgtaccgcgaattggacgttgctaatccggtcacattcgcgctacaagtcgtccatcaaaattggtttgccggtctgatttcactcggcgcattagcagggatgttcacgatgatgttgacgatgacttacagcagttcccgcctcatctattcaattggtcgtgatggcttattaccaaaagcacttggtaaagtgactgcaaaacatcaaaccccaactaacagtatcaaaattgtgacggtagtcatcatgattctaggcgggttcgtttcactggatcaattgactaatttggtaaacatcggcacattggtggcttttttctggatgtcgattggggtcatcccattgcggaagcgcaaggacattccgaataaaaatgggtttaaagtcccattttacccagttttaccgttaatatcaggagcgctatgtttattgatgatgtttgaattgccaaaagtcacttggattgcagcggcaatctggtttgtcatcggcttagtggtctactttacgtatgggattttcaatagtcgcttaaataatgattaaatcagcctcaaaaagctgacgttcacccgcagaaacgctagaataaaacagaggtgacgactgtggtaaaacataaacggctgtggattggtctaataggaagtgtcatctgcgtcctcggtgtattagggacgtatttcgatgctggtttgtatcagcaaccgattattcgggtaacgcgggtccagacaattagccgtgagaaacagactgatgagtaccaaaatgaagatacagaagtagtccagcgggtcacgggccaatttttgaacactaagcaaaaagggcaagtgattacgctgcgcaatacgtatacggcgtcgcaagcgatgtcgacgcggtactataaaggacaacaagtctttttacaccgtgatcaatatttgaaaaagtggaccttaaacgagcctaagcgcgatacaatcatcgttggcttaacactgttgacgtttagtttcctattactaatgatgctcaagcgcggattgatgacgctaatcagtgtcttggtcaatctcgtcgcattcgtcttaacactccatttaaacgcgatgacgggtggacggtggttattgccgattatgtgtggcttagcggtcgttctaacgggtttaacgctacttttagtattaggacccaaccgccagatgcttgtctcatatggcgcgacaattggcgcaacgttcctagcactgtttctcagcatggccgtcttgaaattaaccggcgatcaaggcttgcattatgaaacgatggcctatgaattacagccgtataaaacggtcttcttagcggaagtcgtgctcgggattttaggcgctgtgatggatgagacgaccgatatttcatcgtcactccagcaattagcgattgaacggccaaacgttacgaagactgaattgtttaaatcaggactcgcaattggtcgcgaaattattggtccgttagttaatgtgttgttctttttagtcatggcggatgcttttccaattattttattgtatctacgcaatggcaacacaattgcgtataccttatcgcgaactgtcacgttaagttttacgcagacggtgattagtgcgattgggattactttggcggtgccagtaacgagcttgttggcaagccagttagtgcgggtgagacgcctatgatgttgctaacgggaattttactgatcttattagtgctggtttgtggttggcaagggctgacgattttcttcagccttggtttgaattttgtcgtgattatattggcactggtcttggtggcgggtgggtttgaaccgctgattgtgagtggtctgttgagtctgattttgttagcgacatccatcttcatgaataccaagcagccattaacggccaagacggcgtttgtgacgtcgttaatcgtggtggtgggcttgctgatcattattgtgcccctcagccagttagcagctacctacggctttggtgcggaagatgcagaagagattgaaggctttggactcgcaatcggcttgtcgttccaaaaaattagtatcatgatgatcattctgggcagcttaggggcaatcgccgaaacgagtattgcagttgccagtggtttagtcgaaatcttagaatacgacgcgcaaatgggctccaagcaactctttaaagcggggattgcgatcggtgaaaaaattattgcgacggcttttaacacactgttctttagttttttcggtagcttcttgtcattaacgatgtggttcattcaactcggttatccaattagtaaaattgtgaaccataaaattttaattggtgagggactcgcactattaatcggagtgattggggtcatagcaaccgttccgctgaccagttggctcctaaactatttcagaaaaccaaaagacgaataaagttaacttgaaaaataagtcaattcagattagaataatagaatatatgcacgaaaggaggaaacgcgcaatgtcacaaaacttacatgttagtgtttctggtaaccgtcgtcctgttaaccaaaacaatgctaaaaaacgtaacgctgaaacagctgctgtattgaacttcttgaaggaacgtaaatcagctaaataattataatgaatttttttcaaaataatgttaaaagaccatctaaaagtcgcttgaaaagcagcctttggatggtcttttaatatggaaaataaatatattttaaactaagtttaaccacaaaaaaagagctacatcctaagatgtggctctttttaaatacatatttttgattaaaggacgcgaactgcgaatgaaggcatgaagtagcttgagatacttgctgtcttaactgattcgccaggttgtggtgcgtggacgtatttgccaccaccgatgtagattgcgtcgtggtatgaagcaccagcgccaccccagaagaggatatcgccaggttgtaagttatcaagtgagacgcgttggccagcacgttcttgagcagttgtgacacggtccaatgaaacgccagcttgtgcgtatgcgtattgcactaaaccagaacagtcaagaccaacaccaggtgttgagcctcccaatacgtaaggtgtaccgatttgtgataaagcagcgttgataacagtttgtgcgttaccacttgcttttgtcgttgtattcgtttgtggtgcttgttgagttgttgtagcttgagttgtttgttggctgctttgagttgtcgttgtttgtgtttgagcaggttgtgttgttgctgctggtgtacttgttgtagcagcaggggttgttgcttcagttgtagcagcaggcgctggtgtttctgtagcaggtgccggcgttgttgcttgaggagcagctggtgcttgaacttcagttgtagtggttgttgcagcgactggtgtcactgcaggtgcatttgtaattggtgtgacaccatccaagttagggttgtttaaaacaacgtagctagcaggaacccaacctttgctttctaattggtaccaagttgtgccgtttaaatctttttgatcaatgacgtttttagttgtgccatatgttaagtattcgccagttggttgagcagcagttgtgtcagcccaaacagttgttgcacctgattggaagttagctgttactgtgttcttaacagcggttgttgttgcagctggttgagcagttgcatcgccggctgtaatgaattggcttgaaacccattcgtcattaccaagtttgtaccatgtttggccgtaaacttgttttgtgtcttggattgttacttgttggttagttgccaagtaacgagcaggtttttgacctactgctgggctagtccaaacggttgttgccccgtcagcgtagttaaccgtaccatttgttgcagcttgggcatcatttgtttgaagacccatcaatactaagccggcaaggccaaccattccagaagataagtaagtcattttttgttttttcatgtgtttgttgtgctccttcgaaaatttttttaagttgtttgaattttgaattaatttagtacgctgattagcatagcatctgaaagtaacaaacatgttacataatagttagcgcgctgttacatgtttcttaagatattggcgattaaaagactaaacgtaagcgaacgtcaaaaaagtacgcatatcaagaagatagcgtactttttaggaagtgtcttaagattattggagtgtaccggtttgtgtctgatctgtaccggtctgagtattactttgtgtaccagtcgtcccggttccggttgtggtatccgttgtcgaagtccccgtcccagttccagttgttgcaccagtgccattccccgttgccgtgttagcagcatagcctgtcgtagtttgtgtattggtagctgtgttttggttagttgttgcttgattagcggttgttgtgttttgcgtggttgccgcttgggtattgttagagtaagtgttgtattgattttcagcgttcttaacatacgccaagtacttttctttaaagccgtcatgggttgatttattaatcaaagctcggacgtaagggaagtcgctagcagataggttagctggaatatgcttgaggttgtcgtctgtaaataagttccggacagctgccatagccgctaattgatttttagcttcttgataatcagcaagttgtttggggtggtcggtatagtccgtttcttcaccaagttgtgcatcggctttgacaatcccatctttatcgaaaaaggcgcttgttttaactttgttctttttcttctttttagcaggcttttcagaagcaacactttcagattcactagttgctggttgcttaccagtaatcttatctagatcttcttgggcagccttgtaatcagcctttgcatcagcgctaattccgctcatataaaggttgggcgtgatttgtttgtcgagtttgtcagccgcagtgataatttggtgttgtttattggctgttaacttcgcaggatctttacgggaaccatcactatagagttggttcactttttggacgtattgatcaattttttcttctgttttagttgcggcagctggaatttctgttttattctgacagccagctagaatcatgaaacagctggtcatggtcagcaacagagcaagtgttaattttttcattgagaaaccaccttgttgttagttattcatctaataatatatcatgaaattaggagcgctaacatggtcgtttgacgataattccgaaatcggaaattaacgtgaaatccaatattgtatagaaatcgcaataaatgcgggggttaaaggaaattaatcaacaaatcaggctatactttcgcaagtgagaagcgtacactatggatattaattatgagaaaattttaatcaaacgtgaccgatgagttcaattaaagtggtcatcagagggagtgcaacttatggaatcagcatgtacatcaattttagttggtaaaaacgcatcattggacggatcaacgatgattgcgcgtaacgacgatacttttttacctttaacaccacaacggtttcacatcaatccagctgttaaagggcgtaagggtgctaaaattaaatcttggttaaacgggtttgaagccgaattacctgagaatggctaccgatggcccgctgttccgaatgttgattacaaacataatggttattatgatgaaagtagtattaacgaagttaacgtggcgatgagctgtaccgaaagtacatatggaaatgaaaaagccctcgcttatgatccattggtgaaagacgggttggatgaagattgcatgcaagctatggttgcgccgtacattaactcggcgcgcgaaggggtcagctatctcggtaatttgattaaacaatacggctcacccgccggcaatagtgtgctctttagtgatcacaatgaagtgtggtatatggaaattgtgacagggcatttatggctagcacaacggattccagatgatgcttatgcagttgccgccaaccaagtggcgattcaacaagttgatttcacggatgccgacaattttatgtgggcagaaggcattcaagaatacgttgaagcccatcatttgaatccggataaaacgggctggaatttccgccacatttttggcacgatgaatgaaaaagaccggcactataatacaccacgggtttggtacgcccatcatttatttgatgctgattttgatatgtcacccgaatcggctgaattaccatttattcggcgtattgaacataaaattagtgttgaagatattgaaatgttgttaggctcacattataatgaaacgccattcgatccaatggggcatgggactgatgccgacaagtatcgttaccgcccaatcggtttgaatcggacgcaaaatgcacatattttacaattacggaatgatgtgccaaaggaacaagcggccatcatgtggatcacaatggggatgccaacgtatacaccgttcattccatttttcacgaatgcgaacgatacggatctaagtttcagcgaaacaccaatgaaatgggatatgaagagtgcatattggttataccggacaatttcagtattggtggaaggccattatagccagcacattcaaggcaatgtagattacttaaaccgttgtaagcaagaattgcgaacgatgattgaagccattcaagtggaagcacaaaagtatcaaggcgctgccttaacggagtatttgactgagcaaaaccatgcgattgttaagcagatggcgactgaagcgacctcgatgattggggaactcgttatgtcgggcattaatttatcgaaattgacgttcaatatggatcgtaacctataagatgttattaaaagaagttattaaggatgaaaataattttatctttaatgacttctttttatatagtcacgacaaactaatatagtgggttgatgattatatggtcaattgaattgttgcacatcaaatctatttatagctatttaatgaatcgagtggtttcttttctctcaaaatatgctaatatattgatagcaaaataaattaaatccgttaattgtttctacgcatgacagatcggttagtaaagggagaaaaggttatgacagcaaaagcaacaagcaagtattctgatgattgggaagtagtaacgcatctttcattgatttatcggtggattgtcagcaatttaagcgactttgtcagtggagaaagtttaaattacaaagtttcttttgaccaatttttaattatgtacgaaatttcaactaacgaaaacttaacaggtagtaagttagctaagacgatgagtgttagtcgttcagcaatttcacgccaatgtcggttactgaaagaaaatgggtacgtggttgaagaacatcttcaaacagatcaacgggttaaatttttgagcttaactaaacaaggtcaagacgttttagaccggttggtgagccgctatgttgaaaaataccgtgaaatcgaagcacaaatgggccgtgataaagtcgatggtttgattcgattcattgatcaattctatttagatgtcattgaaccaagtgaataccaagataacaagatgggccgttcattcctaaataaagtaaagaaaatgaacgaagaaagtgcagaatagttattatgaaataggaagaaccgcgtgggggcggttctttttttatggataaaacgtgctttttggttgcaacaacttccgcttaatctaaactagcacttaatcttaaaatcgagattaagcgctagtttgtattaatgctcagttgctgaccgcaaccaaatgcattcttgccttaaacgtgctttcatcaataacttcctgtgctttgctacacttatcaaatcggcgattgcatcgccaattcgctaagttagataaatgctcagaagttacccgttgatgacgcactctgatataatagggcttgtttctttttatgaaattgcttacaattaagccatgaacggattatgaaagagtgggagtcgatatcatggaaaaaattctggctattaatgcaggtagttcaacactgaagtggcaattatttgaaatgccgtctgaacgagtaatcgctaaaggaatgattgaccggttaggcttatctgattctgtattcacagtgaagtatggcaatcaggaaaagtttaaacaagtccaagatattacgacgcacgaacaagcagcaacgttattattaacgcggttgaaggaattaaatatcgtaacccatctcgatgagattacgggggttggtcaccgggtggttgctggtggagaagccttcaaggactctgcagtaattaatccggtcgggcttgatgagattaatcgtttggctgaatatgcaccattgcataatccaacccaagcttattacattaaaattttcactgcattattgccaggcgtaccggaagtggctgtttttgacacgtcattttacagtacgttacctgccgaaaactatttatacagtattccgcaagcgtattatgaaaagtatggggcccgtaaatacggtgcgcatgggaccagtcatcggtttgttgctcatcgagcggctgaaatgctagatcagtcgcttgaaacgcaaaaaatgatcacgttgcacttgggcagtggtgcatcaattaccgcgattcaagacgggcacgctgtcgatacatcaatggggttcacaccacttgcggggattacgatgggcacgcgatctggtgatattgatgtctcattagtagcctttttagctgaaaaattaggtaagacaatgccagagatgatcacaattttgaaccataagtctggcttattagggatttctgaactatcaccggatatgcgtgatttagaagaaaccgctgactcacgaccacaatcccaattggcgcttgatatttttgtcaatcgagttgtgaagtatgtcggttcttacgtagctttaatgaatggagtagatacgctggtctttactgccggtagtggtgagaacggcagtgaattacgggctgccatttgtgaacaactcgcttgttttggtgtagaattggatgaagataaaaataatgtccgcagccaagaacgcattatcagcagtgatcaatcacgcgttaaggtcctgattgtgccaactaatgaagagttgatgattgccagagatgttatgcggttaaaataagggagttatgcaccatgccacaaaaaccactatcagaatatgaagttgagattccccgattgagtgctcgattagaagatacaccagccacaaaaacctttttcgacgcactaacaccaggctatcaacgcgaatgggcacgttatgtttacggcgctaaagctgaagaaacacagcaacgacattatgttgaaatgtgtcaaattttagatgcaggttataaatctaaacgaggatacggacaagcaaagaaaaaataaattaaaaaaagattaatcaggccaaatgcgcgccagattaatcttttttgtgttctttaataaagcggttacaaaaaagagttgaattctcaaagaagctcctttataataatcaccatgatagttagtaaaacgttttactagcctagaataaaggacggaggattgaatatgaatgctgtcaatatcttaattggattaatgccgatgattggttggggattgttccctgtgatcgttggtaaaattggtgggaaaccagcgagtcaaattattggaacgacacttgggacattaattctggccattattgtggctattttccgcgggacaccgattccagaaaccaaaacatttattttttgtttaatttcaggggcttgttgggcattagcgcagattatcacctttcatgtttttgaaaccatgggtgtttctagaacgatgccaatcacaactgggttccaacttgttggggcatctttgtggggcgtcttcatcttgggtaactgggcaagtacacaatcgaagttgattgggttcacagcgattattctaattatccttggtgtttatttaacagcctggagtgaagatcgttcaagcgctagtaaaaatggcgcggtgcgtggcatcttgttattattagttggcgaactaggctacctagggtactccgcctttccacaagcagtacacgcggacggtttccaaggctttttgccacaagcattaggaatggcaattgtaggtgttatcttcggattaacccaaaccagcaagacttatcaacctttcaaagaagcaacttcgtataagaatatcttcagtgggttcttcttcgcgtttgcagcgctgacgtatcttatctcagcacaaccttctgtgaatggcttagcaacggggtttgttttatcccaaaccagtgtcattttcgccacaatcggtgggatttatgtgttgaaagaacaaaagaccaaaaaagaaatggttgccgtattaattggtttagtactcgtattagtggctggatctgtgacagcctttatcaaataaaaagtggggcggatttattatgcgaaaaacacaagttatcaattcacaaatttcaaatgtgatttcaaacatggggcattttgatacaatgagtattggcgatgctgggatgccggtcccagctggaacgcaaaaaatcgatgtggccatcgaaaatggtgtaccaagttttattcaagtacttaaaaatgttctaacagaattggaaattcaaaaagtttacttagcaaacgaaattaaaacagctaatccagcacaacttgaacaaatcaaaaaagtgattggtgagacgcccattgaatttattgatcacgcacaaatgaaacaggacttggggcaggccaaagcatttgttcggacgggtgaaatgacaccttattccaacattattttagaaagtggcgttgtattttaaccattaggagggctttcaaatgaaaaaagtaatcgtattagggtcaacaaatgtcgacacaattttaaacgttcagcgttttccacaaccaggtgaaacattagcaatggatggccgcgcagttgctggtggtggtaagggtgcaaaccaagcaatcgcagctgttcggtcaggtgcgcaaacagctttcattagtaaggttggtaaggaaggcgccgctgatttcatgctagatacgttcaaaaaagatggcatgaacattgatcacgttcgttgttctgaaacagctgggactggccaagcttacatcatggtggatgctagtggacaaaatagtattttaatctatggtggggccaaccaagatgtgacagtcgatgatattcatgaagccgaagaagccatcaaagatgctgacagaattgtcgctcaattcgaagtacctattcctgcaattattgaagctttcaaaattgcccgttcaaacggcgttcaaacgattttgaaccctgcaccagcgattaaaaatattccagctgaattattggcagtgacggacatgattgtccctaatgaaacggaagctgaaattatcacagggattaaagtgactgacgaagcatcaatgaaagctaacgtggaagcgatgtttaagatggggattaaagtcgttatcattacggttggggcaaagggctcattctatgcaacaccaacaacaaccgggtttgtaccggcatttaaagttcaagcagtcgatacaaccgctgctggtgatacctttatcggtgctttaagtacgaaacttgaattggattacagtaacattgaagcagcaatgacttatgccaataaggcttcttcgattgcagtccaaactaaaggggcgcaaaattcgattccttatgaaaaggatattcagttataatcatattaacagcgtccatggctagccggctgtgggtgtttttattaatttgattcgggggagtgccaaaatggttcgaaaagtaacgattaaagatgttgccgcgctggcgcaaacatcggtcacaacagtttcgttaattcttaataataaaggtgagcgctttagcgcagaaacgattgcgcgggtcaaagccgctcgggaaagacttcagtatgaacctgattatttcgcgcaaaatatgattaataaagaaacgaagacgatcgcggtattggtgccggatatcaataatcctttttttagtcagtttattcaaggtgtcgaagaaattgcctatcaattcgatttcatcccattaatttatagtgcaggggcgcataatcagaaagttgatcattatttaaaggaattggttcgtcgaaatgttgacggctttattttggctgtccctcatttacaaaaaacaacgttggatagctatctgcaaaaacgacaaatcccgtttatcttattagatcaatcagataaacaacatgcgggagatgaaattacggttgccgatacgcaaggtggagagttggccgcacggtatctcattgaacgaggccatcataaagtcggaattgttttaccagaacaacgagcttggaacatcgaacaacgattcattggttatcaagccgcgatgttgaaagcccaattaccagtggcggatgagtggcaaataacgacaccgttaacgaaattaggtggttaccaagttgcacgacaggtgattgatagcggggtaactgctgtatttgcaatcaatgatgaactcgctatcggattgattcgtgggttacgtgaattacgagtacaggtgccagaagatatctcagtgattggctatgataacatcgattggtgtgaatatgtcacaccaaaattgacgaccattaagcaaccgattttcgagcttgggcaagaagcaacacgtctattattgaaccggattgtggagcctgctattgcgccacaacaaaaagtactttcaattgaattagttgaaagagagagtgtacaacctatacacccctaaatccataaaagcgtgatccgcatgaagccttgttatcaggcaacttatgcggatcatgtttttttatttgtctaaaaatgaaaaaaaggcttgtaaatatgtcggaaagaactatacttaataagtcttaaagacctgtctaaaagactgattaaagagagaggttatgcgtttatgtatgaattgctgatgttatccgccttaatgagccggaatatgtcgggctataagttgcggattatcttggaaaatgcgatggtacccagacggaaaatttcaaatggggttttgtatccgttgttagataaattggaaagcaaaggctgcattgggtttgaggaagctgatcaggattcacgtggtacgaagattgcgcacattactgaagagggacggcgctattttgctgaattaatggctaaaccagtcgttcatgatgcgaagtgggatgatgcttatcgttttaagatgcgggggatgcactacattgatgcagcagaacaagtcagcattttacaagatttctacagtgagttggctgaagatttacatgtttatagcggtgtggaaaaacatctaactgaattaaaagatgcggatgagacaatgacggattattattattggcagattcgttcaaccgatttcgtaatcacaacgatcaaagccaaaatggattggctacaagcacaaataaatgagatagagaaaatggagatagtaaaatgaaaaaaacaaccaaccgctggatagcgctggccgcgatgagtctgggtgtctttatgggattgctagacgtaactgtcgtcaatgtcgctttaccaagtatggcgattgattttaaaacaacttttagcaacttacaatgggttttgaacgcttatacgttgatgtacgcggtcagcttgttgattgtttccaaattaggggacatgttcgggcgcaagaaaatttttatcatgagtatgattttattcacagcggcctctgtcgttaatggactggcaccaaatttattggtattagatatcgggcgcgcggtccaagcgattggtggctcgggtatgatgagtttatcgatggcactagtggcgtcgaactttgaagggcgtgaacgggggactgcactggggattttaggctccgtgattggtttttcaactgctattggacccttagtagggggctttttagtcgaaaacttcggctggccatccatctttttcgtcaatttaccagtcgggattatttcagtttacttagtgattcgcaatgttaaagaaacaccagcttatggcgcgggcgaatcaatcgattttatggggatgatcttgtcagcaattggtttattctccgggatttatgggttgattcaaaaagaacaacatatgcactgggattggacagatatgcgcattatggggtggttagttgcttccgttttaattttagcgcttttcgtctttgtggaattgaaagcaaaagcaccaatgatgaacttgacgttacttacgaatcgccatttcgtgggtgttgtgattttagctttctcattaggcgctggtatttttgccttagccgcttatcaaacgagtttgatgcaaaattacatgggttactcagccttttcaaccggtgtgcatcaactgccaatgagtttatggtcccttgttttaggaccattcacgggtgttctaggctataaattcggtaaaaaatggttgattgcttttggatttactgtttctgcccttggtttattaatttttagacaagtgacaacgactgattttacttatatgcaactcttaccattgcttgcgctaactgggttaggcaatgcgattatcaatccaatgatcaatacagcggcgatggataatattaatcctcaagaaatcggaatggcatccggtttattgaatgttttccgccaaattggaattaccgtcggtgttgtgattctcggtttatcacaaacgaatgcctacgaaacgagtttgaagactagctttagtggcagctcaatcccgaaggcggcagcaactggcattcagcaagcattggttgaagcaggtgctttttcaggacatgcaatcgcgtgggggcaacaattagtgaagacaccgtatgccgcaaaggtccaacaaattgttgtcatggcttttgataaagggatgatcgctgttgtaacgacgtcgctagtgctcatggtgattgccatcttggcggcgcttttcttattgaaagaaacgaaaacgactgatcgagcataaaaaaagaaggttcattattttctgaaaagataagactgtaaattgtgtagcaaacagtgtaaaatgaacagagtaaaaataaaaaaagtgaggttacttacacatggctaaattagtttttattcgtcacggacaaagtgaatggaacttatcaaaccaattcactggttgggttgatgttaacttaagcgaagaaggcgtacgccaagctcaaaacgctggtgctttattgaaaaaagaaggcatcctttttgaccaagcttacacatcagtattgactcgtgccatcaagacattacactatgcacttgaaggttcagatcaattatgggttccagaaatgaaatcatggcgcttaaacgaacgtcattatggtgcattacaaggccaaaacaaagctgaagcagctgaaaaatggggcgacgaacaagttcacatctggcgtcgttcatacgacacacttcctccactattggatgcaagtgatgaaggttcagcagcaaacgaccgtcgttacgcacacttagatccaaaagcaattcctggtggcgaaaacttgaaggttactttggaacgtgttatcccattctgggaagacgaaatcgctccaaaattaatcgacggccaaaatatcattgtagccgctcacggtaactcactacgcgccttaacaaaatacatcgaaaacatctctgatgaagacatcatggacgttgaaatggcaacaggcgaaccagttgtttatgatttagacgaaaacttgaatgttgtaagcaagaagaaattaaactaattattaaagagtgtgtttaaagcgggttgattctgagcattagcctaaattcgtgaataatcgacgttagtcgattgtttgcggattgtagctaagcgcaggagtcagctttaaaaagcatgtttaataagcttactcaaataggctagtccctcaagggatagcctattttttttgcttaaaaatgacacgttagggcgctactaggacacttcagctaaatttgatagctaacggtaatttaaaacattttgttgacaagcaactaaaacgatgataatctttattttgttgacaagcaactaaacgaaactaaagaaggtttttttaaatgagtacattattagtaatccaagcacatccccatgttgaaaagagtttatccctagcggtagggacccgctttgtagaaacttatcgtcggacccatcctgatgatcaaattattattcgagatctatatactgaagcaggtgttccaccattgaacgatatgacaatggctgcatggcgtaaacaaaaatttgacgaaccaatggctgaagctgagaaaacactattacaacaacacgcagattggttagatgaatttatcgaagctgataaatatgtcttcatcaatccaatgtacaatcattttttaccagctgagatgaaacaatatttagatttgacggcggtcgcccacaaaacattcaaatacacaccgaacggttcagtaggtttgttagaaggtaagaaagcaatccatatccaagcagctggcagtgtttatcacgctgggggcaagtgggggatcgttaagttcttgttccgccgtttatttaagattaagagtaacgaaagttctgcacttatggatttaggcgatatgtatttaaccaatatgttgaaattctatggtgttaatcaagttgaacacgtctatattgaagacgcggatgctcatgcagatcaacgtgaacaaatattagcacggaccctaacggaagcgacgaccaaagctaaagtattctaatttggtgtatactggtggtaacaattgatgagaggttaagcaaatggaaaacgaatcagtgatggcactctatcatgcaatcaagcaattatgctcagatagtgtcaacggccgcggtgttcaagaacaaaaatggttgcaaaatcagctgagtgatgagaacttgaaaacgatgattccgcagctatcaatcattgcattgcacatattatcaggattagaggccgaagaattaacaggtgtagcactagcggatcggttggcggttacgcgtggcggcattacacgcgccgctaagaagttgattcaaatgggcttaattcaagcgactaaaaaaccagatgatcagaaaaaaatctattattctttgaccgctaaaggccgtgtaattgcgcaaagccacgataaaatgcatgaaacgctgaaagcgcaagttattgataaggtgaccgaaaaatataaagatgctgaattgaagcaagcagcgtctttaatcaatgatttaatgcaatttgaacgcgatttttattgatgatattcaaataggctagtccctcaagggctagcctatttttttgtattaagttatcgacggtattttcgatttgctttattgttgcgatgatatagatacaaaagaaatgccagtaatactgtgaccagaatcctcatagccaaaataacatagaacgcaacttctcttccagcgtgaatttgccaaattggcgagaataacaaaaataaaaactgtacttcactaatccaggctgtaacaacactaatttgagtaatcttggttttgaacccgattaaaaaaataaataatgaaagcaagtaaagcaacacagtgacaaatgtagtcgtatctcgagcaaatattgcaagaatttcaaaagttactttagcaccaaagataataaagaaagctgaaaagacacagagacccacgatactaataataactcgacgcagtaccagtaaacgaccttggtgttagatctttgaatagaccattaaacataataagaacctccaaataaaaatcgcgcgttttataatcaagttagccaaatacttttagctaattgataaaataaaaaacaccaagacgaatctctgttatcattgatgttcctacacaaacaatgaaagaggttattgtcttgatgcaagaacagaataccacagtcagaaaaaaaggtcagcacctaacttcgtttgaacgaggcagaattgctacgctgcacagccaaggctattccaatcgtgcaattgccagagcgcttaatgtttgtcatcaaacaatcaataatgaattgtgccgcggcgagatcgaccaagtaaaaaaagtgaatggtcaacgccaatattacgctgtatactcaccagaaacagcacaagctaagtacgaagctaatcgagcccactgtcatcgacctttgaaactcggaggattcggcacatcttggttacctggtggtgatggctttcttggtgaatgtaatcaaagatattggttacttctgcgcaaggaagcccagggctttttttaggatttcgttctcctcagacagcgaagccagtcgcttttccatcgctttgatttcgtctggcgatttaccggattgagttttggcctggccctggatccacttatgaactgttgaatagccaatgccatattctctggccagttgggcagctgattcgccttgcttatataggttgataatgttttgtttgaattctttgtcgtaacgagttggcatgtaaaaattccttccttttgagagatgatttattcattataccctctcttaaaagttgtctcaggaatcagcttacatccagttttaatttaatcactaattttagtttcgttattattaaagaagaatttttctctcttattaatagaaactctgacttcatccataccaataaacagaaaagtaaaaaacaaaagttcgtacgtttctacatttggtaatagcaaataagtaaaaagaactaatatacaaattgttccacctttgtatattagattatttcgtccaagtgcatgaaacaatccatttaaatagggtaaaagaaaaattacacctcctaaaatgccaaaatcatacatgagcagatatatggatgactctactaaatttacatcggtatactgtccagccactattggaccattatgtccaaatccgagtccccaaggattagcaagaatttcttcgataggttcccataaatcagaaacatgctttgttgcagatggatctgtcattccagcggttgaagaaaagctactaaaaatcatattagcaatcaacccatttaaaataatcgagtctattagaattacaataactattattattggtaatataaatacatatcgtagctttatccttagcctaactaattttcttctatgataaactgccaaggcaaccacagttccaagtatcgcacttctactaaaggtagtgactaatcccagcacaagaataaccataaataaagtactctgcttgattttaccgaaattcgttgaaagaatcaaaatagccatcccaaaatagacaccacaaatattaggagaggcaaatgtactcgcagttctttgtattccatagaagtgactgatatagaaagaattactagcaagatgtccatctaacgaaccataacctattttgacgagaaaagagtctcccaaaacaaatgcctgaaatacaccaaatattgataatacaaccgcaacgtatacaaaaatattttcaattagatttatatatttattattagcaccgctattaattataataaaataaataatcgttggcattatataagtacgcgctaaattagcagcgacgtcaggtctatcggatgaaaacatatatattaaacaaactatccaagataaaagaattggaacaccaagtttccctaaagagaaacgtccattattagcaagaagcgaaatagctatacaaataataagtaaaacatctctccaaatgttatcaattgttccgtgaataagcgttgcaaaaaccatattatgtatgggcataagtataaccataagtaaaataaacttacgtccaattgtgagcaccgattttgtacctatcattatttttctcccttacaatttaaagaatagaggataaaatttcagctgaaatatccgtagtttccatgttggcatagcattttgtccaatttttatccattgattcatggtattattatcatcataattatgtccctgataaggtagattgtaaaatttaagttgaacatattagtggacagaaaaacccataaaggtctttaatggtgtcaccacaacattccactagaaagaaggacctttatgggcaccactattttatcatttgaagaccgcgttgtcatcgaaacacttcatcatgaaaagcactcacttcaatatattgccgattatttaggctttagtaaaaccactatctttaatgaggttcatcgcttagctggtgagtatcacgcagttaaggctcaaactgaccatgaagttaaacttagtcatcgtggtcgtaaaaccatcttaacgactaacctaaagcgattgattgaagaaaaaatcaagatccaaaaatggtcaattgaacaagtggctcatgtagttagaattgcctacaaaaccatctataactggattgatcagggactactggatattaatgtgactgatttggtcccctgtcaataaaatagacaatttaaatagagacttttttgtcctatgccacgactaaattttgaatttgagtttgatactcatcttcaagttgctttggtgatttgaatccacagtttgagcgaagttcttgggtgattttgccggcaccgtaaatacaaaggcttttgagccaaattgctttaatttcaccttgaataaacttcttccgaagctttcgcggtgattggtgattatgacgcttttctcgttggtagtaaccacttcttgagattccaacataatcacacataacattgatggaagggtgggattccaaagcgtgctgaacgtccatttcttggtatactttttcggtagttacttgctcagaatcccgattgatttttttaacacttcgatcgctccttcagcgtcacgaagttgacgctttagtcatgcaatctccttgtccttatcgctggcaaaattaccagagccacggccaaactccccagtctcaggaatcagcttacatccatttcttattaataaccgtcagtataataatacaaattgaaactaggattaatcctatcatataattaacttgactcattaaaaaagccaatattgaacccataactacataattactatttgatgtacgtttcctctctagattcatttatacacattcctcgtttcaacttagataccctggttacttattactagccgtaaaattaccatttcttattttaactgcaaatgatccgttacgaattctaaatataacgttaattattaataaatctatgttcttcatagattctattatttttgttgtcctattatcatttgctaaggctaacttatataaattaaccctatgtaatcttcttatcttatttgctggataattaggaacaatacttaaattatattcaagatcatctaatgattctttccaattttctatatctaatgataaattttcacccgaatttttatgaatataaaccacgttatcacagaacttaaacaacctattttcattaaacattaggagccataataaataatcatcagttccgcttacatgcataatattattttgccaagcttctggaatactagattttttaattagacattgaccaggcgaaataattaaatctctaatatttaagtaattagattcaattactacactctttttatagctagaagttgtatatatttctgccgacgtaccatcaaagaattcaaatttaccgttattaataattacatctatatttagcttattcattttcaaaaaactaatttctaattctttaaaattaatagaatcatcctgatccatgaactgaatatactttccgtgtgcagctttcaaaccttctactcttgagtaatgaattcctttatttacttcgttattgattaatctaatgttacttttcatccattctgttaattctaatggttcactcggactatcgtttatcataataatttcaaaacttactctatgcttaaaatcaatattaaagatatattcttttaagtttcgctcaatacgatctaaatattttttccccttataatatggaatgattattgaaatatccaaaattatctcctttaaatacgtttatcgttgaataaattatttaacgacttccaatcacttttgccggagtccctactataatagaattatccttaaacactccattaacgagggtattagcccctataacgcagccatctcctacaatactcccatccagaaataccacacctgcgccaatccaaacgttattcccaattttaattccttgtcggttaacaccttgatttctaattaattcatccttattagaaaaattatgattttccgcatggaatctaacgttttgtccagaaataacatcattacctattttaattccacctgctgcaccaaaaaaagtattttctgcaaaactagaatcattacctattgagattccttttccaatacaatgtaatgaaccggtgcacaacatactactattttctccaatttttactctatcacctaagttaataccctcttcagataatgcgtctaatgttacattactatctaatcgaacattacttcctagatacaatttactaggcaatattatttttacatttcttcctgaaacgagcctttttccacacttcttaataaaaattgacttaaaactcccacgaataataccaaatatatagattcttccttttcttataatataagttataggaacttcatgagataattgaaaatccttttttccactaatttttctaattataccttctaaacccatattataaccctacctatatatagaaacttaataattcatcgacatgttctgtaatattctttacatactcatcttgcttaacatacatatattgctctattttttcagttaattcttcaattgtattaaaccgatttattgcctcgaataagtccttagagcctacattattgcttataaaaacaggagtttggtatgctttggcttctagcgcgaccaatccaaatgtttctttccacttacttggaacaactaatacatcaatatttctgtagatattggctatctggtttcgattgtatttaccatgttgtacgatgccctctatactagatgcaacattgtatccatatgtatggaactcatatttctcagcatccaacaacttggatagtttaataaattcataaaatcctttaaaatattcattcggccctacatacgctattcttattttttttgattcagttttaaaaagtaccttctggtgagtataaatatctttattagttatcgagataatcttatattctttctttggtagttcttctaaattattttcataaactttttttgctactgtactattaaagtggtatttatctattaaactaaaaatatccttgtaataattacgtaacagcttatattctgaatcaggtatatcgttattatcattgaaattgctatttttttgaaatctctcttgttttttagaacttatagtctttattttcttaattagctttcgtattaccgggtagaacttaagttgaaatattctaagttttttagtggaataagcattctctgaagcctttttccaataagcatctgtattatcttgatcatacgacttcttattatagtaaaagctcgggtctggtgctaaaccaaagtaatcatgcgatgtgaatacgattgtgataccttctgacttagcagcactaaaaaattccttaggtattcccatcaaggtatgaatatgaattacatccggcttgatttttttcaataaattaataaatagcattttagaagtgggtatcataaaatctgctggtgttttaattcccccaaaaatcggtagcggtaaactatttattaattcaaatgtcttaatatttgagaaactaccagatttaatctgcatttttctattgataaaattcaatcctccaggaaataaagcataaacctcatttccttgatttatctgttcattcattacatcaaatgcataacccaccagtcccccgctacgagcaggtgggaaccctaaagtatagtgtaatattctcatctatttctccattgtgaacgttttttcataatcagtaacaattttatgccaactaaaagcattattaattctttcggaggatacttgattaaaagattcaacttcatttaatgctaatttttcagaataatctataaccttagcaagatcgtttttatgccaatataatgcaccgtcttgaccaacttccttattaaacccaacatctaacaagagatttaatcgtgttgaagatagcgcttctaataatgaaggattggttccaccaacttcatgaccatgaagataggcaaaagcattttcacgaatatacttcaacaattcagcatcgtatactgttccaacaaacttaattctaggatcagattcaaaatttgttttattttgtaaatctgcataaaatttatttttttcaacatttgaaataatgactaaatccttatccgtagcagagttcataaattctctaatcatcgtttcataattgttttcgggaacaaaacgtcccacaattaagtagtagttgtttaacttaaccgcgtgttttgtgtaccagtctgtgacaacctgatcagtgtccgtcaaacttgatttaatgatatctgacccataagcaatataggttgtcttaggtgaatattgcttgtaatcattttgaatgtacttctcaatattttggctgtcacaaatcaataaatcagcatgttttaccatcaatcgttctgaatacttccaatacttacgaactggcatactccacttagcgcgtaaccactcatgaccgtctggattgacaaacaatgtaccgttgtattgttgtaattgcttcttaaaatgcttaataaaaggccccatccggcaagcgagtacgtaaacaattgcattttgaacattattttttttaatataattcatcgtccatttaaaggcatttacatcatacagaattgctttagcaggtcctacatttggaacatcaatattgaaacaagttgcatcattatattcgaacgtatcagctttattttccgatagatcacgtcgacaggcaacgtaataatgaatattatcgctttccttacgtgccgttaactgttcaacgaaagattcaaagcccccataatttgcaggaattcctttagcaccaataataaatacatttttaaccattcttattctccctgctctagtatgcatcatttggcataatcataattttgaccgttctaaaaagaatgcctaaatcataaaccaaactactttttcgaatgtattttaaatctaattcaaccatttcgtggaacccaatactattacgaccgctaacttgccacaaaccagtacaacctggttttaccataagtcgttgccagtcgtaatctgtatattctttaatttcacgttccaatggtggtcgcggtccaacaagcgtcatatcgccaactaagacgttccataactgggggagttcatcaatactatatttacgaatgaacttaccaaccttagtaatacgcgggtcttccttcattttaaacatcgcaccttcgacctcgttgtacttcaacagattctttaatttttcatctgcatccgtacacattgagcggaatttgtacattttaaacgttcgctgttttaatcctaatcgcgtttgcgagtaaaaaacaccgcccgcgggatcatccattttgatcaaaatcgcaagcacgagaaaaagcgggctcagtaggattagtcctatcgaactcgctatgatatcgaaaattcttttgataatacgataaccataccgttgatcaataacagcttggttaaaaagcatgacttggcgtgtattctcgacctctatcgctttatcaaggttctgcttttgtacttccatatttatacccccaagtttgttactttattcctctgctccatagtaaccaccgtaataaccaccgtaatagccgcccgtattctcagccttcacgcggttcataatggttcctaaaattcgggcattaacgacttctaacaactcttttgccttggcaaccgaacccttttcaacaatcccttgtggtaccaccaaaattgtcccatcaactttgctagcaaggatttgtgcatccgtcaccgatattacaggcggtacatcaaaaatcactaaatcaaaatgctttgttaactcttggattaatttatccatcttcttcgtattcagtaattcagatggattaggtggtacaaccccgcatggtagaacaaataaatgatcaactggtgttttttgaatcgtattagttaaatcaaatgtttcctccgttaagagtgatgtaagtccacgtttgttcggtacttggaaggtttgatggactgttgggcgccgcatatcggcatcgacaagtaacacatcaaccccttgatcagcccaagtaactgcaacgttcgcactaaccgtggacttgccttgtaatgggccagcagatgtgaagacaacactccgtaatttttgatcaattgacgagaattgaatattcgttcgaaccgttctgaattgttccgcaatgactgaagtcggttccgttaacgtaattaagccaaccccttctttcatacttgcttgatctaaactcttttcttttttaaataagcccatttccctatcctcttctcgataagcgactgctacttacgttgacaatcgcttttttaatcaaatctttatcagcaatattattcacgattcctaagctggttaaaccaagttcttctgttaagaaactttcttctttaaccgtcttatccattaattctcgtacaaaggcaatcccaacgcctaataatacccctagcaccagaccaattaagacgttcaagttctttttaggtgacactggtgttaaattcggtttggcttctgaaatgattgagacattgtcagtcccactcataattttcggtgcttttttctggaatgttcgtgctgttgtattgacaatatctgccgcagtataggcgttatcagacttagccgtgattgagaagacttgcgaattttgattattagcaacactaagcatgctagcaagttcaccagcagtaagtttgtggccatcccccttattcatcttacttgccactgaatccataataactggtttcgtaattaagtctttataggtgttaatcatctgaacatcagcttgcacctgattcagctgtgcaccaacatctgtactttgtttacgattaactaagagctcagttgaagcactatattgtggcgtaatcaagaaaaacgtaacaatgattgctaacagcgtacatacaaccgttgatgatagaataaggcggcgatactttcgtaaaatgctgaaaatctgttcaatattaatcgtttgctccatgataccctccaaaattaattaacaattataattactttactccacgctgaaagaagttaaccatcactggttagcttctttcatgattatttcaaatctaattgcttccgtaaacgtgtcgacatttgtgctacctcggttggattcatcacttggaaggattgcccgtcaatcatttgacccgttccttttagttgaagtgtcttgaagtgcatggcatcgccatagttttgttgaatatttaagacatccttcaaagtgatattagtctgcatattattttctaagacttgcaagaatttgttataattcgtcaccatgttcaatgacgtagctttcttcaaaatagcttgaacaattgcttgttggcgaagttgccgaccaaaatctccgcgtggatcgtcgtagcgcatccgtgagaatttcaaagcagttggtccatcaagactgactgttcccttttcgaaatggtgaccttcgtaggtaaagtccaaatcattttccacagtcacgccaccaacggcatccaccaattgttctaagcctttcatgttaactagtacgtaataatcgaccggtacgtttaagaaggcttggacagtgttaactgccattggaatgccaccataggcatacgcggcattaatcttagccgtctgaccatagccaacgattggtacccgtgaatcccgggcgatactcaacatgttggtttccttagtcgttggattgaccgttgcgagcatcattgtatcagtccggcctttttcggttcggcctagttcccctgtatctgtaccgagtaagaggatcgagaaaggcgtcttcttatttagttcgactttttctgaaactttgcgcttattttgtgtcttacctttggatttatacactgtcttggcggtttgattaacatccatatagaccttagctgcgaatgcgcccccggcaagaatcaataccccaagaacaactaaaatcacttttgttaatgtccaccctctgcgccggtgcttatggtgatggtgtcgcttctgttcttctgcagtcatccgtttcgtatcctcctcgaaaactaaacaaaaaaataatcaatcacattacatactatttatactacaatattttctattatagtataacttttattgaaaaggaaatctttttctggaatacaccttaataaaaaacacttagttttcacactaaattgtgaataacccccttaacattgggcggtaattcaatattcaagatttttaaataattaaatatttttaaagtatcgaaagtgaaagtggtttacgaaatctaagtccatcaaaaaaccgatatgtaaaaacattagtttgacatatcggttgagataaataattttaattttagagactaaaaataggttgtaatcatccggttgattcccgaattcttacaacctatataattggttaacgtttcaattcatatttgtgctttgtctcattaatttttcgactgtcattcattttgatcgcgccgacgcgcaatgaagtcatgaaccttaccgcgactggcgttaacatgcccatgcagtgcttcttcaatcacaacattcaagacagccccaaccatcagaatcgttgcggaataattcagccacaagagtaagataatcaccgcaccgattgcaccgtaactattccatgacgtgccgaagtaacgaatatacaatgagaaggcttgtgcaagaattaaccagccaaccgttgtcagtgctgcccctggcaaaacacttcgcaatcgcattttcacattcggaacgaagaaatagatgaaaatcagcagtaggaacaaggcgatccccgtcactggccattttaaactactaaaaatattaacgtatgtcttaggaatgttaaagattgggactaataattccaaaacttgttgcccgaatgtaaaaacaacaattaaaccgactaataatagaagtaataataatgtactccccaaagaaatcaggcgttttaaaacaaagttctgaactttttcaacacgatacgcgcggttaatactattttttaaggcattaatccccatgctcgctgcccacaacgtccccaagatcccgacggacaataagccatcattgcgtttcttcaatagggactgcagaactggcataatcttgtcgaatatcgtgggcggcaccgccgtttggacgtaatccgccacactcattacatctaactggaagtacggtaagatgttcccgataacgattaatagtgggaagattgataataacgaataatatgcgattaccttcgaattatcactaatgcttgcttctgatgaacgcaacatcattaacttcaccacagcaatcaacttctgccgtctggataagtcctgttttaccaccggtaactggttttgattgtctactgtcatatgtcactccaaattctcttttacacattagtcgttctacctgaaaggcttattttcccgacttcttaaggcatatttatcatttctattatacacgaattaactatgggctaatagttttctgaaagcaaaaaagaaaccttctcattttagagaaggtttctgattttatagtaaatatttagcatccatttctggatcttgtgaggttagaatcttaggaccatctttggtaatcgcaattgtgtgttcatattgcgcacatggtgtgccatctgctgagacgtaatattcccagtcttcgccagggacttcttttgacttgatgtgccatgtgccacctaagatgaccattggttcaattgtgatggtcatcccttctttaaggcgcaagcccttgcccgcttcaccgtatgaaggcacgtttggttgttcgtgcatcgttggttgaataccatgtccaatcaattcacggacgtcaccgtagctgttttcaacttcggtatattgttggatggcgtggccgatatcacctaggcgattgccgacaacggcttgatcaatgcctaagtaaagtgctttgcgcgtatcgtccattaatttttgtaattctggtgcgatttcgccaaccgcataagtccagcaagaatcactttcataaccgtccaagttaacggtcatgtcgacactgacaatgtcgccttcttttagaattaagttcttccgtggaatggcatgtgccacttcctcattcacgcagacacaagttgcgtacttgtagccttcaaagcctttttcagatgctttggcaccgtgttgttcgatgtagtcgtttgcgaattcttcaattacccagctcgaaatacctggtttgatgatgtcgcgcaaaccgcgatgaacgccggcaataatggcgccagaagcagccatccctttaatttctcgttcagattttaatgtaatcaaaatgaaacctccaatattgttaccattgtagcctttaattgtatctatttctatattatacgctatctgccattaaaatggacgaatcgtcgctttttagttcaattaaccgtgaaagagccgttgcaccttttcttaataaggggcttttgctataatgccttatagtataattcgttaattgcggccactgagcgccgcgtacgtgaaaggatgtcccaataatggcaactgctaaagtagtctatgcaagtatgaccggcaataacgaggaaattgccgaaatcgttgaagaagccctcgaaagtttgaacgtcgacgttgaaaccactgaaatctctcaagcagatcctgccgattttgaagacagcgatatctgtatcgtctgcagctacacctatggcgatgatggcgatctccccgatgaagccgttgatttctacgaagatctcaaggatattgatttaactggtaaagtctacggtgtctgtggctccggtgatacgttctacgatgacttctgtaaagtggttgatgattttgcagccgtcttcgaacaaaccggcgcaacaaagggttcagacgttgtcaaagtcgatctatcagcagaagcagaagatattgaacatcttgaaaaattcgtatcagagattgttgcaaaacagagtgcgttataagctcggtcagtatccgagcactaacctagtctggcacaggatactagcttataaagcacgtttcaagtcagagtgcgtttgaaacggttatgctttgagcattaactggatttgccgaataggtgatgcaatcacctatttggtaaatttggttaagcgcagaagtatgtttcaacaagcacgtttcaaggcagagtgcgtttgaaacggttatgctttgagcattaactggatttgccgaataggtgatgtaatcacctatttggtaaatttggttaagcgcagaagtatgtttcaataagcacgtttcaaggtagagtgcgtttgaaacggttatgctttgagcattaactggatttgccgaataggtgatgcaatcacctatttggtaaatttggttaagcgcagaagtatgtttcaacaagcacgtttcaaccaatcttccctgggccgcggttacgtccctttttaccgcggcccttcttttggtcttttagaccttaataaatcaaactaggagctgtctttatggctttcattaaacggttagtgtttaaataccgcgattttttgacctatacgatttttggttttttagcatcgttggttaatatttttacttactgggtatttcgccacaccattatttggccgtatttactcgccaatacaatggcgtggtttgtcgcgaatttatttggcttttttaccaataagtcgcttgtattccaatccaaatacaccacgtttggcgctgtgtgtcgtgaagtgctttcgtttttctttttccgtggtgtatcctttttcttggataacggtttgatgattgtcgccatctccttcttagggtggcagagtatgaccgccaagattatcgatcagttaattgtcggcattgtcaactacatcaccacccgctacactttcaaaaaaacagaacaacaaatggcactccgggggcggattctccgtcggtacaatgccattttgaaaagaggtcacaatgattaaagccatccaacaactcattcaaaaatactgggaacaattaatgtacttggtctttggtgtcttaacaaccctagtcaacatggtcgttttcttcggattagaccactatacaactatcaattatctcgtcagcaacacgattgcctggttcttatccgtgctatttgcctttttcaccaataaaacgtgggtctttcagtcaaaatatacaactttaaaggacttttcccgtgaaatggctagtttctttttcttccgtggtatatcatttataatggatacggcaattatgtttgttgggatttccttattggtatggcccaacatgattgttaaagtgctagatcagattatcgtgattttagcgaactatgtatttagcaaatggattttcaaagatacttcggaggattaagatgactaagacgatttcaattattgtaccctgttataacgagcaagaatcaattccgcttttctacgcagcagttgagaaagtagcggctactctagccgaccaccgcatcgaatacatcttcgttaacgatggttctgctgatgaaagcctggcggaaatgcgcgcgttacaggcacaagaccctgaacacgttcactacatttcattctctcggaacttcggtaaagaggctgccttgtatgctggcttacaagccgcaactggcgactacgtttcagtgatggatgttgacttacaagatccgcctgaactattacccgaaatgattcacggcattgaagtcgaaggttatgactgtgtcggcactcgccggacaacacgtgcgggtgaaccccccgttcgttcgttcttcgctaaacaattttacaagattatcaaccggatttcacaaactgaaatcgtggatggtgctcgtgattatcgcttgatgactcggcagatggtcaatgccatcttagagatgtctgaatacaaccgtttttcaaaagggattttcagttgggtcggctttgacaccaagtacttagaatataagaaccaagaccgcgttgctggtcaaaccagttggtcattctggggactcttcaaatattcattggatgggattgtaactttctcagaaacaccattagccattgcgtccttcgtcggctttttctcattcacgattgccctgcttgcattaatcttcatcgttattcgtgctttgatttttggcgatccaacaaccggttggccatcactcatttcagttatcctaatggtcggcggtttacaactcctatgcctagggattgtcggcaaatacatcggcaaaatctacctagaagttaaaaacagaccagtgtatattgtgaaagaaaagaaataaagtgcgtttggttgcacttagcaactgagtattaagacaaaaaacagtttgaatccgcacgtttatctcatcaaaaaaagccctcgccattatcagtcaaaatgataatggtcgagggctttttcaatgctcattatttaaacgcttctggtttttcttttgattgaccaaaatgataagcaattgcatctaaaatccgttgagatgcttgtccatccccatatggattcttggcatgggccattgcttcatatacggcttgatcatctaataattcaaccatggcatcatgaacttgttctggttgtgtcccaaccaacttcaacgtgcctgcttcaaccccttcagatcgttcagttgtatcccgtaagaccaacacaggtttgcctaatgacgttgcttcttcttgcacaccaccagaatcagacatgatgaagaaactccgtgcagctaagttgtggaaatcaacaacatccaatggatcgattaaatgaatccgtgggtgattgcctaagatatcttgcgctgcttcttgcacaacagggttcaaatgcactggatagacgatttcaacatcatcatgggtttcaacaacttggcgcattaccttgaagacccgtttcattggttcaccttggttttcacgtcgatgtattgttactagaatcattcgtttgtcagcatcaacaacatccaagattgaatgattgtagtcgctttgaaccgtttgtttcaatgcatcaattgcagtattccctgtaatataaatagccttttgtggatgattttcttgtaataagttggcttcactttgactggttggtgcaaaataaagatcactgagtacatctgttaattggcgattcatttcttctgggaatggtgaatacttatctcaagttcttagtcctgcttcaacatggccaatcgctgtttgattgtagaatgcactaatgcttgctgcgaaagtagtggttgtattcccatgaactaatacgatatccggtttttcagttgcaatcactttatcaaggttcattaatacgttgctagtaatttcactaagtgtttgccgttgtttcataacgtctaaatcgtaatcaggtttaatcttaaagatttcaagtacttgatctaacatttgacgatgttgggcagttaccactgtcacagcttcgaattcatctgcgcgttctttcaatgctaatactagcggcgccatcttaattgcttctggtcgtgtcccaaaaacagtcattactttaattttagacacaaagctgcctcctattatttaataagttacccccctatactacatgttttctaaagatttgccaatctttaaccaccctacaaatgaataacagtctgaatataaaaaaggacgcctttttaggcgtctctttttaaaaacatcgcttcaacattcgtttgagcatcgcgtctatttctgcgtcactatagtgtaccaacttcgcattcgttagggtcgccaaacccgtaataatgatccacgcttcgttaataatgcgttcgtgttctgactcactaaccgtttttaacggttgatagtcctgcaatctagtttgcgtcaattgccccatgaaaagttgtacttcatccttaccaaagtggttatcaataaataacgcacggtaaagttctggttcgattgtagcaaaacgaatatagccaatcccgagattgactaaggcatcatctgttcgttgttcttcactgacataccacaccaaacgcgccttggcttgttccaaaatggcttgcttgagattggccatattaccgaattctaaatagatgggttgtgtcgaacagtctagtgccttggcaaggctgcgcgctgtaattgcttttaaaccatccgctaataccatttcgtatgctttatccagaatttgctccgctttaatccgttttgtccgtgccatcgttcccactccttaaccgatcaatccgtttttcaatattatctactgtcactctaccacaaaattaaataacatgaaaacgtttttatctgttttacgagttttttaaatcgccatgtgctatgataaacatattaaatcgcccttaaggaggaatttttgatgactactttccaacataatcttgaaaaatacgccgctttagtcgctaagacagggatcaacgtgcaatccggagacacagtggtgctccaaatcgctgttacgcaagctgaattcgcccgtgatatgacagctgcttgttatgacctcggtgcagccgaagtgattatcaaatggcaagatgatgacatcgatcggatcaatatgcaacacaaagccgaagatcgcctcgttaacgtgccagacttccagaaacaagaatacgattactggttagcaaataacgccaaacggatttcggtgatgtcgagcaatcctgataaccttaagggtctcgatggtgatcgggtcgctgctgttcaaaaggcaaacggtcaagcaatgcttaaagttcgccaagcaacacaagccaacaaaaatagttggattgtaattgccgcagctagtcccgcttgggcaaagaaagtctttcctgatatggacgaacaagccgcaactgataagttatggacagagattttcaaaacaacccgggtagataaagaagacccaatccttgcttgggaacaacatggcaagaaactgcaagccaaagccgctgaattaaacgctgcgcaatacaaagcactccattacacagctcctggcactgatctcacaattgggttacctgaaaaccacatctggatgggtggtcctagccgtagtagtgatggtcgttcattcgtcgctaacatgcctactgaggaagttttctcagcagctgatgccaacaacgtcgatggctacatttcttctacgaaaccattgagttacgctggtaacacactcaataacatgcaatttacttttgaaaacggcaaagtggtcaaagccaccgctgaagaaggcaacgatgtcttacaaaaactcttacaaaccgatgctggggtcaagagcctaggtgaagtcgcacttgtaccagatccttcaccaatttcacaatcaaagatcaccttctacaataccttatttgacgaaaatgcttcaaaccatttggcactcggctctgcttacgccttttcaattgaaggcggcacagatatgtctgaagaggaattaaaagcagctggtttaaaccgtagtcaagcccacgttgacttcatggtcggttctagtcaaatgaacatcgatggcttaacgcacgacggtcagattgtccccattttcagaaacggtgactgggctgactaatgattacatggctcatgctccttggcgtctgcgtttgtctaaccaccttcttcattggactaaccgcctatagcgcctaccagaaacaagcgattggtggtctaatcattgtgtgcgttgccggtttagtcttaaccgcaatcacggcattcttctactaccaagcactgacgcatttataattcgaaagggtcgcgacaaaatttttgttgcgaccctttttgatgtgctagactgttggcatactttttgttcactatatcattattcgttagtaataatgattcgtatgtactggtataacaggttttatacaatgtttttgttgtgaacaattgctcaaaaacaattgataatccttctcaattagctataatgaagttaaatcaaccagaggagtccgccattatgaaagaattatccgccagtgcaccactcgaacatcgtttccatttatcagaacgtttgaacattatccgcgccggcgttttaggtgcaaatgatggcattatctctgtagctggaatcgtagtcggtgtcgcgagcgcccaccaaagtcagtacacgatttttcttgctggtatttctggcatgcttgctggcgccttttcaatgggtggcggtgaatacgtctcggtcagcacgcaacgtgatacgcagaaatccatgatgcggcttcaaaaagaagccatccaaaacgaatacgctgctgaagtggccagtctacaacggacttacgaatcaaaaggcttacccactccacttgcacatcaggtagcttcagcgttcatgcaaaaagacagtctcgacatcacactccgcgaaaaatacaatattgaattacaccattacttcaacccgtggcatgccgccttttcatcatttttctcattcatgttaggctcattgctgccaatcatcgccatcctagcaattccatacccttacaaagtcagtggaactattggttcaattgtccttgcccttatcgcgaccggttacacgagtgcaacgttaggcaaggcaaaccgactcaaaggcgttttacgcaacgtcttaaccggcgtcttaaccatgatcgtcacctatttaattggtggttctatcggctaagcttcacttttaacctaaaatttgctatgctatatttaatttaatcgtcgccaccgggcagttaatcacttcattaggtcaaagaagaagtgattggctgtcctttttttgtggccgatattattaggaggttctattgtgtggcatgggttgatttattgattgcaggattggcagaagtttggtgggcaacgactatgaaaatgagtggtgggttcactaagctcaattacacattactgacgattgctggcatgctcgtcagcttcggttttctaattcgtgcgacgaagggattaccattgagcattgcttatccggtttggaccggaattggcgcagtgggagctattttagtcggcatcatcttattcaatgaacacatttctttattaacctggctattcgttattttattagtaatcggaattctcgtcattaaaatgacgagtggtcattaaaaaataggcttacccattttgggtaagccttatttattaacgtgttctaattgccaactcgcgatagtttgaatcaactcgattggtaatgccgttacatctttttcgaattgtagtgtccctttgccggtctgacatggtgcgacagcttttgcaaaatgggccatcggttgattagtgggataaaacccaatgtgccgtttattaatgccaaaatagcaaactgctttaggctgataatacccaaccaaaccataagccagcttcatctctgcgtccggtaacactgcccaaagaatggtgtgcattgccagtgcgagtgttcgatcagcatcagttgtaaggcctgcattatattgctcaataactgtcatcttatccccacctttattttgctctcattctagcatgaaacctcaaaaaaagcccaaccgaagttggactcttgaaaaaacaataattatttaacagctggtgtaccgaaccattcgatacgtgattcaactgtgtctttgattgcttttgtacctggtgcaagaactttacgaggatcgaagcctttttcagcttgatctttgttttctgcatagtattctttaacagcgtttgaccatgcgatttgttgttctgtattaacgttaacttttgagatacccatttcgattgctttaaggatttgttccttaggaatacctgaaccaccatgtaatacaagtggtaagtcaatagcgtcagctaattcttgtaaacggtcaaagcttaaaccttgccagttttcagggtatacaccatgaatattaccaataccaactgctaagtagtcaggaccagcagctgctaattgtttagcttcttcaacgtcagctaattcgccagcaccgatgataccgtcttcttcgccaccaattgaaccaacttcggcttcaactgagatgcctttagcatgtgctaaagcaacgatttcttttgtctttgctaagttttcttcgaatggtaaatcatgaccatcgaacataactgagttgtaaccaacttcgatacattctttagcagcttcgtagttaccgtgatctaaatgcatgataacaggaactgtgatgttcattgacttgattgtttgttcaaccaagttcttgcataattcgtaaccacccatatatttagcagcacccattgatgtttggatcaagattggtgtgttagtttcttgagcagcacctaagatagcacgtgtccattcaaggttgtttgtgttgaaagcaccaacagcgtaatgaccttcacgagcagctttaaagatttctgtaccattaactaatgacatgaaaaagcctccagattaattgcaacttttgcgttgcgatttttgaatacgaatctattttaacatattttcacctaatataaatcataaatccgtaactttctgaaagtgaaagcgtaatcattctgcttgattattttacaccaattaaaaagcacactagttaatctagtgtgcttttacgacaattgcttcaaagtgcgcccggcgagaatcgaactcgcaacctatcgcttaggaggcgattgctctatccagttgagccacgagcgcctatgagtcatattgtcgcatctgttgttttaattgtaaagttgattttaataaatctttattcatccgttaaaacggcgttcatcgtttcttgacctaaaaagaacacggcaccagccgctaatagtatcgcacccgtaaaaagtgtaaaaatcacggctactgataccccctgctgaattagcgcaccaactaaaaatggcccaaccacaccgccaattcgcccgatgccagctgctaaaccactcccacttccacggacaagtgcaggatattgttctggggtataagcatatagcgcaccccatgcaccaagattgaaaaaggataacagcgcaccggccacgagtaacatggcaactgagtttgcattgccaaacaataatgcactgagtgctgttccgattagaaagccacctaaaacacgtttccgcccccatttttcaatcaaccatgctgctacaaagtagcctggtaattgtgccaaggtcataatcagcacatattcaaaacttttaaccaagctgaacccttttaagaccatcacactggggagccataaaaacatcccatagtatgaaaagaccactaaaaaccatacgagccataacataattgttctttggcgatacgctggttcaaataaaacacgcaatcgttgcatgaatggtaccttacggttaatcgtcgtcggttcatgctcttgtttaacatgtttccgtaacacaagtgtgtagatggcgggcaatgacgtgatcaataagaccactcgccagccccaaactggaatgacaaaataggcgagtaaactggcaactaaccacccggctgcccaaaaactttctaacaatacgacagcccgaccgcgcgatgccgttggcgtattctccgagattaatgtcgaggctaccggtagctcgccacccaacccagcaccgaccaataaccggagtactagaaatagactcaacgatgtactaaaggcagatatcccattgccaatcgaaaatactaataaggaacaaagtaaactgttttttcgaccaattttatcagctaaaatgccgaaaataacggcgccaaaaaccattccaattgaactgacactcccaattaatcccatttgtgcgctactgagttgccactctttggcaagcgcagcaatcacaaacgatagcatccccacatccattgcatcgaacaaccatgcaccacctgcagcccataaaagtgtcctatgttcttttgtcatcccgcattactcccttatgttatgaatggtcctatcatacaaaaagagtttacagatgtcaagacacctaattatgcattataataaatatttatctgtttaagcgctgcgacaatttgcttaaatcgttgttttgacgcgcattcaatcgtgtgtaaatgaatgccgtcggttaatgttgaaagtaatttctgatggggcattgtggccattttttgcataaagcctttgacatctgtcaaggtgccgattcccagttgaccggtcagttcaccatacaatggatgatcaacggtcacgtcgatcacgcgccccccattttcaacaatcgttgtcaattcgagttcagtctgcccctgattatgctgacaggcaacttgtgcctgatatggcattgtttgttgcgtctgcgtttggtcgtaataaccgctaactgtcgcaataatttgggccccttgtgcgcgaagtaaggcgatatccccaacaattgtctgccggctaactttatattgttgcgctaatactttggcactgatgggttgcgcactcttttgaattgcattcagaattgctgtacgtcgttcttgcgttgtcatattgccacctcgtcttgatttcttacgctatattctaagcgttctaaaggcaaaaagaaagtggagggttgaaacgaactcgtttttccggataacctaaaaatacatattatggcttaaacccgccataatatgtatttttctgttaatcctcaaagccaacccgttcgactacgcactcttgttttaaacgtgctgcttcgaactgccttttccggttaacctaaaaatacatactatggcttaaacccgccataatatgtatttttctgttaatcctcaaagccaacccgttcgactgcgcactcttgttttaaacgtgctgcttcgaactgccttttccggttaacctaaaaatacatactatggcttaaacccgccataatatgtatttttctgttaatcctcaaagccaacccgttcgactacgcactcttgttttaaacgtgctgcttcgaactgccttttccggttaacctaaaaatacatattatggcttaaacccgccataatatgtatttttctgttaatcctcaaagccaacccgttcgactgcgcactctatagtatttccccgttacttttaatgactttttggtaccagtaaaaactgtcttttggatagcggtttagttctctttcttctgtttcgtcgcgatccacgtagacgaagccatagcgtttttgatagccgtttgtccaacttaataaatctgtgaagctccatgtcgtgtaaccgatgaccgaaacaccatcggtaatagcttcgtgaatggcttgaacgtgcgcctttaaaaaggcaatccggtagtcgtcgtgcacttgcccgccttctttcaaggtgtcataagcccctaaaccgttctcagtaattaagaccggcagtccataacggctctcaatacgtctgagtgcgattcgaagtccttcggggtcaatattccaatcccagtcagtttgttgcatataggggttatcagcggtcttgtagacgcctggcaacccacttgcttggctagtgccctttttaccggaagtattttgcttggtcaaaccaacgccaccttctagtgggttagtcgtaactgtcatcgtctgatagtaattcaaccccataaaatcgggatgtgcgagtggatcggctaataaagcttggtccgcttcagtaatttcgggtgcaatcccgtttcgttcgagataagtcatcactaatttcggataacggccccaagcataaacgtccatccacaaatcagcgttaatttgttcggcattatcagccgcaatttgattttctgggtccgcattcagcgcataagttgggctgtaggcaaaactaggtccgatgcccccttgatagcctttttcatggaataatttaatcacactagcattggcaaggtttgccatatgattagcttgataagttcgcttagcatcagtcactgctggcggatgctccgctgttaaatagccgtgagtgatgaagacattttgttcgttcaaggtaacccaatgttgcacacgatcgccgaagcgttcgaacaataagcctgcgtagttggtaaaatcttcaataatttgacgcgattcccaaccgccatattcggcttgcaacgcttgcggtaagtcccaatgataaatcgtcacgattggttcaatatcattggcaattaatgtattaattaaacgatcataaaaggctaagcccgcctcattcacagcgcctttaccatttggtaagacccgtggccatgaaatcgaaaaacgataggctttgagcccagcgcgtgccattagcgccacgtcttcttcgaaacggtgatagtgatccaccgctacatcaccattcgtggctttgaacgttttgcctggaatgcggacaaattcatcccacacagaacggcccttaccatcttcttggtaggccccttcaatttgataggccgcagaagctgaaccccacaaaaaatctttaggaaatggtgctaattgatggtattccattactggtcatcctactttctctcaaagtcattgcttattgttctgcttgatatgttttttcgatttgtttcaacattttcttaaagccgcgtttacgcatgaaacccatgacaaaggccatcaacatatcattggtttgttgtaatttaccatttgctttggcattttcgcgatagataacttcaatagactgcggtccattcgcgaaaatatcgtaacttgattgatagctcccccgggtagaagtcgtttcgtagtgataactctgatctttaatcagttgcgtaatcttcaatgtcgcccgattcttgccaaattgcttgtcgtacgaataattaggcaactgcgcttcagttagtttatccccagtttgttgcttaatatcaaacaacactgattccagaatcttctgataaaaataactagctggcatttttaaatttaatttaatttccatcccgttcccactcttctcttcaatgtgccatttgttgcttttaactaaaaagagctcgaacaaaagtcattttgtcctagcccttttgttcattagccaaactttaatcgactggtacaccggccatcttcttgtaaacgtcaacgacttcgcctgctaaatcgcggaaagtaattgcgttcatcaagtgatcttgtgagtgaaccgtcaataatgtcacttgcatgtgatcgccacttgcttctttggttaacatatctgtttgtgaattatgggcttctgataaagcagcatccgcttctgcaagtttggcagctgctgtttcgaagtcacctttcttagcggccatgattgcttccattgagctactcttggcgttcccaccgttgataattaatcccatgattgcttctaagttctgttcttctgccatagtatggcacctcctatgatcatctcatcgtgaaccactttcgtaaccattcattaattggtctagatatttcttcgagaatgactaaccaatccattaaaaggctttcaaaaattagttcctgattgtgagagttcgccactatcgcattttacgaagcgaaagaaaacccttacttatattgtaatcgcttcctaagatttgtcaattaattactgataaccttttcacaaacggactagtccaaaaaaagaaaccttaacaggttgttaaggtttctcgctcaatctggattagaccactagtcattatttttcttatggtagcccttattcttttgatttcgtttacggtttttcttatgttttggttttaatggtgcagctggctgttggcggactggtactaatttggctttgcgcgcgcttgtcgttggcgtagccttttgtacttgtccttctgttgcttcaccagtagttggtacagcagatgttgctttcgttgcagcaactggtgctactttaggcgtcactggtttttcggcttccaaatgatcaccaaccaaataacgggtcacaagatcatattcaggcgccaataacttacgcaaattccgcccatcgtgttgattgcccaacgtcaaaacagtcccggtgcgtcccatccgaccagtccgaccagcacgatgaatgtaagtgatttttgcgtttggtacatcaaaattaatcacataaggtaagtcggtgatatccaagccacggccagccacgtccgttgctagtaagagttgaatcttaccttcacggaaatctttgagcgctttttggcgttctgtttggcgaccttgccctgagagtgcggcatacgttactttttgatgttttaacgtttgtgcagcttgtaagagttgcgcggattggttaaaaatgaccaaacctctaaaattcttttgatgtgctaaatggcgtaagacgttcactttttgagcgttaccagttgggataaatgcatgcaacacttccccacccgtcttatcaatcccacgcacgtcgattgtttcgattggcacgccgaaccatgtttccaactctaataagatatcggttgatgtcgctgaaaagaagccaagttgcacatcggcaggtgattcttgcacgatatggcgggtttctgaaagcccgctatccgtcaataattcgtcagcttcgtccataataatcgcttggagtgtatggaatttcactttccgttgttcgctcaattctaataaccgaccagtcgttgccacgataatctctggtttggccttaagccgttcgatttggcgtttaacattcgccttccccgtaatcgcttggacattacagtcgattgccttggcataaggttgaatgacgtcccgtgtttggatcaccaattcctgtgaaggggccaaaattaagacttgtagcccttcgcctggcataattttttctaataacggcaatgaaaacgcgagggttttcccagaacccgtgggtgccagtcctagaattgattggtcttttttcagtggttgataaactgcctcttggatgggtgacatttctgtaaatccttgttcatcccatagtgcttgaaatagtggtgaaacgctcatgtattgcctccgtcatgttaatctgcatcaaatgttattccggccgactgtcttaattgatataaaacttggttgaccgattcacttagctgtaataattcatgataccgttttgtgtcacgattagcaatcatcgccgcgaaattttctgcctcagcaaccattggattagcaagtgattgttcccctagtgactcaatcttttgcccaccttcgctgtagcggtcaacactgccgattgtgccggcattatcgaggacaatcgtcgtttggccaccataaatttcagacgttagataggaatcaacggttttgccaaaaatcaacgtgacgttaaaggttggataacgcagtgttgcgacccctttaccatccactccagttggtaacaattcagcttgataatcgactgaatcgggcacaccaaaccagctgacggcatcatagacgacatacacgccgagatcttgtaaagctcctccagaaaaatgtggtgagaaaatattcggttcttcacccgctaaaacagcgtcatagcgtgatgaatatttcatatagctcaaggtcgcgccattgatcgccggtaatgcgttgatggcttgttgtacaatcttaaagttggcctcatgaatatgacgtgctgcttcgaataagaattggtctggatgttgctttaataatgtttgcatggctgccatttcagccggattactgaaggcaggtttttccacgatgacatttttacccgctaaaattgcttgcttcgcttgttcaaagtgcagactattaggtgatgcaatgtagacggtttcaaattcattggcattcataaacccgtctaagtcagtgtaacttgtggcttctggtgcgtgatacttcgttttaaattggtcggctttatctgccgtccgtgaataaacagctgttaacttaaatgattcagattcccgggccgcatcaacaaattgtcccgtaatccagttagtcccaataatcccaagtgtttgcattataatcagctcccttatttaatactgccagtatacgggatttagatctagaagcctatcgaaaagtttttctactgataagaattccgccactattcacttctttaaccattccttaaaaaaacagtcgtgagtccgataattaattgtccgcaaactaactatttcgtggtagaataatagtaagttggggtgtgacttatgcgattttttaaatttcaaaaaccacaagcaattttaaatcgaaccattcaccagtatcagcaaaaagttcggacgactcaagcgagtaaagtagcgactttttatgctggacactggtcttttaatgacaaccaaacccgaaaaaaacacacattagaaattactccgaacttgttggtgcaaatcgatcataagccattgagtggtcaagtcatttccctcacggaaaacgaattggtctttctcgatcactacggctatcaattaaaaattacttgtgaaaatcaacggcccgtttcaatttacgatgaagccgaagatatggattatccaatcgaatagctattaaaaaaggcccataacgcttagcgttatgggcctttttagttattctttatttgttcaacattttttgagctttatctgggacttcgtttttggcaaccttttcccatgaaaccacacccttatttttattgacgattaatttgaggtacgcatttcgtttaagcggcgttgatttattaccattaaaatcaacttttttggtaacaccatcttcattgtaggctgcttgttgatagttataatcgataaccgtttcccctgctgaatccttttcttccattcgtgttccgtttgaaacaatctgtgtatagtaggcttccccaccgtaataatagctatgaattccccaactaccaccgatgaaaaccaccacgattgcgattaataataaccagcctttgtgtttaatcattattttctctccgtttctatttaatagtctgccattgttgcttggtgccagtaaaaactgctaactgatagttcgtctgattatcactgtttggaatctgactagccattgtgtattgccagaacccgttcttagtcgccaatgttggctgttcccgcgtagtttgccacaatggatagtctcctttgtgtggcacataccgttttaataagctgggtgcaccaccaatgagacaattttgatgataatgttgattaatcaaggtcactagctgcgccagtgccatttgcgttttcttttgtgcgggcggttgttgtgcatagtcgttataataatccaaatagatcataattggtaaatcacccgtctggctgccaactgctttaaaaagttggtcagcttggcgttcaggcgaactatcaaaactaaaaaaatgaaagatgcccacgcgtaagccagtgccacttgctcgactgtaattggtgtcgaaattatcatccttgtaactggccccttcagttgcttttaaataaacaaactgaataccgtccttttttaacccgtcaaaatcttggtaaccatctgactgacttaattgcatccctagaatcggatattgcgtcgcgcttggtcgatccgaacggtgtttcaaccaccagatagcaccaccaagacacagagctaccgcgataatgccgataattatttgtcgccaatagcgcttttggaaactgtcttgaaaaatcggtgtcacttttcgtctcatccacggttcctccatttccagccttagtacgcttagtttactatcttcatgcattcgagacaagccacctaacaattttgttcgttactgtcacttagagttgccttttattggtaatcagatacaatgtgaacaaagggaggcggaatatgttagatgaacgcttagtggggttaacgtttactttacaggatgctaaatcaaccggcaccgttaatttttttggcatcttatatcattaccgtgtcgaaggaccagctagcgctggcttactcgtcatggtaacggccgtcacacctttagctttaatcgtgacagcgcaccacaatattctggcgtattaagccagacaaaagggagtttttattatgggtattttcatcagtattttagtcattcttgttttagttattgttgcagtcaccctcttttcatcatttgccttgattcataccggggaagttgggattttggaacgcttaggggtctacgttaaaacgcttgatcctggtttccatttggtcattccattcatttatcacatcacagaaatcgttaatatgaaacaaatccccttaaaagtcgctgaacaagaagtcattaccaaagacaacgtggttgttatgatttcggaaacgattaaatatcacatcactgacgtcaatgcgtacgtttataaaaataaagattccgttctaagtatggtccaagacacccgtgcacaattacgtgggattattgggaacatggacttgaacgatgttttaaatggcaccgaaaaaattaaccaaaccctttttgaacaacttagcgaagtaacagccggctacggcttaaacgttgatcgggtcaatatcgattcaattcaagtggcccacgatatccaagaatcaatgaataaattgctccgtgcttcgcgtgaaaaagaagccaacattatggaagccgaagggctcaaagccgccgcaatccgtaaagctgaagggttaaaagaagcgaatattctagaagccgaagccaataaacaaacacaaattttggaagctgaagggaaagctcaaagtgaacgaacaattgccgaagctgttaaagatcaaattaatttgatcaacgccagcttagtcaataacggcgaactctatcttcaatataagaatattgaagcgatggaacacatcgcagacggtcaaaataacaccattgtcttgccaaataagtcaatcgatagcttgggtaatttgccagcaattggtgctctggttcaaaaagaaagtaccaagcattctaattaatgaatgccaataaaaaaggccccagaataacaaccttactgttattctggggctttttttattggtcttctgaaggtgttgaatccttaggtgttggttgtgtattgcgggtgttctttttgctgagaatgtattgttctaacaaggccacaatctgttgattctgtggtagatcagagtgttgtgcttggtcacctgtcaccgtaatttcggtgtagtgcttgacttgcccttgataaatgtacttccccgcctctacactacgcgcgggtacaatcccatcattttcaaagttttccgttcccgcaattgaatacatcgataagttcgtcggaatatttttacgtttcttaatgaaatccgtcagcatctgtgacttatgcgtaatcgatgtttcggaaaagttatacggcgaaccaatcgtcatcaacttcttcactgtaatatcatcgcgattaaaataatcttccaaaaaagctgtataaattaagccaccattagaatggccaaccgctttaaagttattaaattgatacttcttagtcaacgcggtaaatgcgagcgaaaaccatttagcttgcttttgaatattactgtaaccgtccttattattttcaaaaccaaccacgataaacggttcattatcccgcggtttaatttcccctgaatagctaatctgattattttcatgcacagttagttttaacaagctgtgccgattcccgcggttagcgttcaatttagccactaattcatcaaaccgattttgggttgcactactccctggaataaaaattaccggtgacattcgtgaatcatggcgcttagctaaggtcataacgctctggcgactccattgagcagctggccacattaatccgccgatcaaggccaaactaatgactaacaaccagaggcttttttttcttaatttggccaatttatgccgcctcctttacaagtgctaattgatctgccaattggacaaacggcttgtagatcatcacgccgacgacaacgtttaataccgtcaccgccagcgcgactaaatcaccgttggtgcccatgaacgcttgcaataagccgggggtcccaagtggaaccgtgaagactaccgatggcatgagattcaatgcaactgctgccgatgcaatccccatatttaccagtggtaccaataagaatggaatcacatacaagccatttccaatgacaggcattcccacaaggaccgcgctattaaagttaaataaaacgggcaacagcgaccatcgaccaatcaaatgataatccctttgtttgctgaagatgaaaacggcaatcactaaggctaatgtcccacccgtcccgccaatcgcaccaaagggttcatacaaagtccctaacgtgaacggatatggaacgtgccaagccgtgtgatgactaaacgcatagtttaagttggccgaagatgcgattccctcacgcccaaattgggccaatgttggcatactcgttaatccaaaaaaagttaagctagtggccgctaaaccagtccccaacgtgaaaagcagacccgtttgatttgcttttagtgattgtaatcgtaagatgacttgatctggcaagattgaaatcgccaaccaatttagcaggatactcagccctaaaatgacgccgagcaccaataaaatcgcccacatagaatccaatgaacgtcctactgctgacccattcagcggtaaatcacgccgatgaggtcgtcctaattttttgaaggctaatccagtcagatagccgactaataggccaaaaaataagccccccattcccaacatctggctattgaaagataagccctcatttggcgtcaaccgtaacgctaagattaaataggcaatgagccccgtaatgctggctaattgttcatcacgcttatagtgtttggctgtatagcgcgccgcacacatcgctgctaatgccgcaacgattcctaacgtcaaactcgtaatgctgtcaaacatcatctgaaagatattccgtttactcaaccaattcgaaagatgaaatacattcacaacaaaactattccggttaaaaagtgctagctggatgagttggctgatactcccaatcaagacaaatggaaataacaacgttaaacttcgctgcataatctgatagaccgccgcggattggaatcggttaaaatgttgcgctaagcgcatcattatagattgttttttgacattcatgcgttaaccctctaaacatgttttgataatttcattctagccgaccttccgcttaaatgcacgtctgaacgcaaaaaacgggtcgctactttccatctctggataataacgacccgctaaaacgtgctttttgtggcaacttcttccgtctagctacgtctgtcaaatcaccaacttgttggttattcgccagcctaggctatactcagaagttaaccgccacaaacgcactctattttgaaacgtgctttttgtggcaacttcttccgtctagctacgtctgtcaaatcaccaacttgttggttattcgccagcctaggctatactcagaagttaaccgccacaaacgcactttattttaatactaatttagtgacactttcgacgtgtagcgtttgtgggaacatgtcgactggttgtgtgctttctgcttggtagccttgggctgccaatagttctaaatcacgcgccaatgttgctggattacagctgacatagaccatcttggctggttttaattgaccaacggcttcgatgaagctagcttccaaccctttacgtggtgggtcaacaatcaaagcatcgacttttaagtcatctgcttgccattgcgccatcacttcttcggctttaccgagtgtaaattcaacgttttcgatgccgttaatcttggcattgtgccgcgcatccataacagctgattcaacaacttcaacaccgtaaacttgcttagcatgtttagcgactgctaatgaaatcgtcccaatccctgaataagcatcaatgactgtttcgttcccggttaattcagcagcttcgatcgccttattatacaagacttccgtttgcactgggttcacttggtagaatgattgcgctgaaatttcgaacttcaagcccattaattcatcacgaataaagtcgcggccagcgattaattttgtttcgtcaccaaagatgacgttcgtttgagcagcattgacgttttgcatgatgctgaccacttctggtaaagcttttttgatttcaacggcgatttcacgggcagccggtaatttcttactccgcgtgatgaagacaatcatcatttcgtggctgtaataaccgcggcgaaccataatggtcttcaaaacacccttatgcgtatcttcgttgtatggatcaatgtagaaacgacgcaagatatcacgaatgaccttgatagcttcatcaatcttaggatcttgaatgtagaagtcttccattggcatcacttgatgactgtgtttccggtagaaaccagttgttaaagcaccatcgataaaccgaacaggaacttgcgccttgttccggtaacctgttggatcatccatccctaaaacaggttgcactggaatatctaaatgggctttttggaagacgttcaagacttggttacgcttgaaatctaattgggctgggtatgccaagtgttgtaatggcgcaatcccagtttgtgagtaaatgttagcttttgattcaacgcggtctgggcttttcttcaataaattaactaagcgcgcaaaaccatattgtttattgacctttgtgacttggatttctgcttgttcatcgggcaaaacgccttcgataaacaacggatagttgtcgactttagcgacacccatgccttcataggttaaatccataatatcaaccgtcaatgtttcattttttcttacaggtgcttgtattttcatagttacctctttttaattgtgtaaaaagagtctgagacaaaactgagttttgcttcggactcttttcttagctacaagtgtgcggtcaatccgcccacgttatccaatgttccagtttaacctattttaccatcgccgtctatgtcttcttcagaaattgcttcgacttcctttacgaataaatcttcggcagactgctgagtaggggtttctgatgtaatagcgtgatctggaatatcttccttattcacatacatctcgatatgttgttgcaagttagtaaaggtcattggtgcatcgccaccgtattcgccatctaaattaatcatcatcttaacgtcatcatcaccaggacgcgcaactagttttgacgtcttggtataaatgacccgtggatcattaacgtgtttgccacctttaatgacgagtgcgattaaatggactaattcggccatgttggctgtcttaaccacaatcaatgagaaattaccatcattcagttgtgcatccggcgcaatctgttcaaatccaccaactgaattggttaaaccgagtaagaatagggaagcttccccatcatacgtaccttcatcatattccagatgcatcttaatcggtttaatttggggtaacatctcagcaccttttacgacatacgcgagatagccaaaaattgacttaaagtctgaggggacttcataggtcaattcggttagcaaaccaccaccagcaatgttcatgaagtaattgtcattggcttgaccgatatccatcttaagcgtttggttcttcaaaatcacgcgggctgcttcaaccggattatcacgcggaatcttcaaagcccgagcataatcgtttgttgtcccagccggaatgacggccatcattgggcgtttttccaagccggcaatgccgttgacgacttcattaattgtcccatcaccgccagcggcaacgattaaatcgaagtccgcctttgctgctcttgtggcctctttttgcgctgaagcttcttcaggcgttgtttgaaaagcactcgcttcataacccgcttgttccaaaatatccagaatatcagcgacactacgtttcatcacttcatgtcctgaagttggattataaattaaccgtgcacgtttttgcattcgaatctcctaaaatatcaattatcgtttgttcaattcggccatcaacaagtcattgacaactttcggattagcttgaccccgtgtttccttcataatcttaccgactaagaacccaactgcgcggtctttaccgttcttgaaatcatcaattgattgttggttgtcatctaaaatacctgtgatgattggtgtcaacttagcagggtctgataattggaccatgcctttagcttcaacccaggcttttggatccgtgtcattttggataatttcttggaagactttcttagcaatcttcgatgaaataatcccgtctttaattaaattgatcatttgggctaagtgggcaggtgtgagggccgtttcttgaaggtcaatttgtttgtcgttcaagtaagcattcacttcacccatcaaccagttagaaacttgttttggtgcggcgccatcagcaacagctgcttcaaagaagtcagacatttccttggtgttcgtcaagacacccgcatcgtattcaggcaagcccaattcatccacatagcgtgcacgccgtttagccggcatttcaggcatattgtcttgaacttcttgtaaccaatcatcaccaatgtgtaatggtggtagatctggttctgggaaataacgatagtcatccgcaccggtcttaacccgcataaggaatgtttcgcccgttttttcgtcaaaacgacgggtttcagggcgcactgtttcgccagcaatcaaaagttgtgattgacgcttgatttcataagctaaccccaaacggacgtgattaaaggagttcaagttcttcaattctgatttcacaccatattgcttcgcaccgattggtcgcacagaaatgttagtatctacccgcattgaaccttcttccatcttaacgtcagatgcgccagtaaattgaacaatttggcgtaacgtttcaaggtaagcataggcttcttcaggcgttgacatatcaggttttgaaacaatttcaatcaaggcagtcccttgacggtttaaatcgacatatgaatagccgtcagagccatgggtattcttcccggcatcttcttcaacgtgcaattcggcaatcccgatttgctttgtatggccatcgacttcgacttcgatatagccatctttaccaaggggttgttcgtattgtgtgatttggtaagcttttggattatctggatagaagtaattcttccggtcgaaatgcgtatcgcgcgcaatatcagcgtgcaaggcagtcgcaaccatcatcccaagtgtgtatgcccctttattcaaggttggcaatgtcccaggataaccccagtcaatcacattcgtgttagtattcggttctgcaccatagtttacaggagatggactgtacatttttgaattggtttttaattcaatatgcacttcaagtccgattgttgtttcgaaattcattaggcttttcctcctttgaagcttggaacgttcttgttaaattgagttgcttgttcaaaggcataacctgcgcgataaacagattcttcatcaaatgctttcccaataatttgtaaaccaactggcatgccatctactaagccggcaggcactgacattgctggtaagccagccatgttagcaggaattgttaagatatcgttcatatacattgtcactggatctgatactttgcgacccaagtcaaaagcggtggttggtgttgttggtccaaccactaagtcgtagtctgcgaaaactttttcaaagtcgcgcacgattaatgtccgcacttgaccagccttcttgaagtaagcatcgtaaaagcctgatgaaagggcaaacgtccctaacataatccgccgtttcacttcatcaccgaaaccttcagaacgtgatttaacatacacatcttcaagtgtcttggcttcaggtgaacgataaccataacgaatcccatcaaaacgtgacaagttagatgaagcttcacttgaagccataatgtagtaagtttggacggcatacttagaatttggcaagctgacttcgtcaacggttgcccctaatgatttcaaagtttcaatggctgtttcgatttgggctttaacgcctggttcgacaccttctgccatgtattctttggcaacagcaatcttcatgcctttgatgtcaccatttaaagcggcacggaaatcaggcactgggatatcagcactcgtactatctttttcatcatgaccactgatggcttgtaaaacagtcgcattatcagcaactgtccgactaaagaccccaacttgatcaagacttgaagcaaaagcgatcgcaccccagcgtgacacacgaccgtatgttggtttgatgccgacaatcccattaaatgcagctggttggcgaattgagccacccgtatctgtccctaaagaagcaacgacttcaccggccgcaactgctgctgcagaaccacctgatgaaccaccaggtactttgtctaagttccaagggttctttgtcttcttgaaggctgatgtttctgttgatgaacccattgcgaattcatccatgttgtttttaccgatcacaattgcatctttagcttttaatttttcaacaaccgttgcatcaaaaaccggcgtgaaattttcaagcatcttgctggcagcagtagttgttaagccatctgttaataagttatctttaatcccaattggcatcccagctaataagttatctgcatcaattggttgggcgtccactttggcagccgcagcttgtgcaccagcttcatcgattactaaaaaagcatcaacttgtggttctctcttgtcaatttcagcaactgtttcagttaccaattggctagcagttaagtcaccagccactaatttggcatggatactttgtaaatcttcatataagtagttcacggctagtcttcctccttatccataatggcagggactttcaataagccgtccgctgaatctggtgcattcttcattaaaatctcgcgatctgtgccagcttgagccacatcttcgcggacaatattttgaaggttattcacgtgggtcgtcactgggacacccgttgtatcaactttatttaattcatcagtcattttcatgatgtctgcaagttgttcagtaaattgttctaactcagcatcgctaaaagctagttttgaaagttctgcgacatgctgaacttgtgttttatcaatcatgagtaaacccctcttctaattctgtcacttttatccattctgattaattttaccatatattaacgtataagaaagtgacatcccttggaatttaccagtttttcctaatctttaccggtttcagcagatattgaaatatatttttactttctttttaaaagcgtaattgaatgttatgcaattcattagaaggcgatatgatttataagagtttatcatagataagcattcgtttaatattatatactgagtacagataataagttgttaataatgtacaagattatcattaacttatagatgagtgttataatatgaaaatcaatatctcggaacaccttgtagcagtagcagttttaagtttaatgggtggcattgtcttacaaagtacgaccgtttcagcagcgaccacttcggttggtgtaactatcactggtgtaacacctggaatggccgctaaagccaaagaagcagccgcagaacaagccgctttagaagaagcatggttacaaacagaaatcgatgacagcgaacctgtagaagttaccgaaacaattggcggtcaaacaactcactactgggaatcagcagatggctcacgaagcacaactgcccccgcagaagttcaagacgaaacagtagccgcaccggaagtagcacctgaacaatttgaagaaacagcagttgaagaagaccaaccagccgaaaacttcaaaccaatgcctaagaaacatgacatcgatcaaaaagcaattgctttcaaacaactcacaacagattgggctagcaatcaaatcatgtcatcattggaagacttaatcactaaggctttccaacttaacaaataacactcagtattagctaagcggcaagtatcgtaaccaagcgtccccagttttgagtagtttcaaaagcaacactcaatagtctgtcggtgtaacttacggatttacccatactagaagttactaaactatttagaattgtttttttcctattttaaacgtttataaccactccactgctaaaataatttcattaaagtttgatgagttcacccaaaattttgggtgaatttttttattgcttaatgatttttcaaaaataagtctaattttaatagacatttcacaacttatttcatgctcataaaagaacccaaacctactgatagaagcaacttaattgattatcgggctgtattatcggtatccagtctgaactcccttcatgtaattttcatttacggcagactctggctagcctgattacagcagaacacctcaataggtgttatactcttaataacatctttttaaaaggagtctatcatgaaaaaatcagtccgtttaagcaatgccgtccacctgatgaccctgattgctttaaacccgtttgataacctttctagtcagcgcattgctaaaagcatcaatactaacccctcttttattcgccaaatcatggggcaacttaagacagctggcctattgacgagcgttaagggccatgccgaacccaaactaacgaaagctcctgaccaaatttcgctctgtgatatctataaagccgtcgatgatacccggttattgaacatcgatacccaaattgatcctagttgcggccccggacaaaatattcaattatcgcttgctacctattacgatcaaatccaagaaactgctgaacagcaaatgcaagccatcaaactagccgacattatcgaacaatatcaacaacgtctcgttgaaaatccagaattaaaactttacgaaaactaacacacaaaaaggttgggcaaattgcccaacctttttgtgtgttaatcctcagcggatacccggctgatgccgcactcttttcttttaaacgtgctctatcagccaaccgcttccggttaaccctgaatggcaaacaatcgctaacccggttattcaccattctgtgttaatcctcagcggatatccggctgatgccgcactcttttagatttgctagtacctttactaagtcatacttaactgcaataccgcggtccgttaattcacgtggcacaatcgcatctttgggattaacggtgatatatgttgcttgtggattttggtacgtcagattcataaacggttccttaataaacatcggtgtcatcatacccacacctagttctaagtagaccgtttttttaccttcagctttttgaataaattgacgatactttgcgtattgcttgttgtagtgttgtccttcaaggaattcataaccacggacccattccaacatttcagcaccacatttagggcaccgcggaattaagttttcgggtaaatggccattttcaatttgcggaaataattggtcaacaactgtctgattaggatagacttaatcatgacatttatctgcacattgaaaataggaccagtcaccctgaatcgtggcgacatctttatctggaaaagctttcgagaattgcacgtcttgattcgtcgttatcaaatcatagtctttatcctttaaaatggctttcaagtcctgatacggttggtaaactggttcatgtaaaacaaaatgaattaaagacagcttaaagccccataaatcgccgggattgtaccaatcgggaccagccgcagccgacatgccggctgcggctcccacgatgacgtaatctgcctctttgagcgtcgttgccattttttgtagtgttgcttgatagtctaaattagtcatttttgaggagctccttaaaatgatcatcgattgatccagcaagaccgattgaccattgttcaatggctgcgggaatattgatttcgtgcggtaaattcaacgtgatgtaacggtaacttagactttgcgccaccaattgcatgaggagtgccttaattaactgattattagcaccaattcctaattccagaatcaccacgttttgtgaacgatacttttgaacaaatgcgttaaacttagcttgttgcttttgaatcatcggcattggattttgattgttaccaaaattaccttccacttcaaaaatccgttcttcgtcaaatccactcagttgaaaatgcatgttgccatttgatgtgacaacaaagtattcatgaccgcccaccaactgctttaaatcgcgaaagacaggtgtactttcatagtgatcaaccatataatcgaacaatactttgtaaaatgcatctctttcagccactgttggatagttgtaaaaagccccttgaagaatattcataatcccgtagcgttcataaaaagtcccaaagtgggtcataaacgcttcgtcgtgtgcaaaaatattgtaaccttccgtaattgatagcccattaccagcactaataatgacggcatccgcattgtctagccaattccgtgctgttttaaactcgttcatgatgctctcatttggtgtaataaataaaataacaacaatatcgcatattgtacactgttatttttaaaattacaaccactgacttttaaaggtccaaaaaaatagcgtcgacaactgcgttagttgtcgacgctatttttttgcctatcagtcataactgactgttgtcgcactctttaattaataactcccgaatacgtgggttgagaaccttttactgccggctgctcggcctacgtaagcttgcatcccctctgcagacgagattgaaatatctaatggaatattttgtggtaaatatttatcagcagcggttgcaatgtattgtgtgaaactcatgatttctgtttcactgtagaattgtgtattaacggtgatgttcatcccagccaatacaccatcttcatagtgtgcttgagccgtgacaccactcaagttcgggaagaaagtttggacttgttctttaaaactagtaaacgcgtccgcatcactttgattgaccgctttttcatcattaacgagtgggaaaacttggttggcttggttcattttgtgccatgaatcaatcgttgtactaccgtttttgctgaccccataagcgaagaaggttccgcccactaaactatccttaggtgcttgtttgtaaagccccaccacgatggttgtcttactcaaaccttttttctgccgtaaacgcgttaagaccttattggccatttgtttaccttgttgcgccatcatggcactagaaattttggtttcaaaagtagcaccatattgttccttggtatagtaatccacttgattcatcccaagaccaatactcatcccttcaagcgcaccatctgcccctaagaagtcttgttctaagatttgttggagatacagtggattccgcttatccggttctttttcaccattatcttctggatttaagccaagtgtattatcttttgattgacgtgccaaccatttttgcgcttccgccgttttgatggtttgaccttcttggtagaggtatttatcagtagggaattgttttttagaaatgtttaataagccactttccaaactcttcacatcaaatgccgtgttactttgttgtgtggttaatccacgtgtctgacttgtcttgtattggttattatcaataaccccttcatacatgctgtcagtcactttcccggtcgtttgtagctttttagtcgacttagttgatgatgacgaactcgaattgctttgtaaacttgtacaacctgccaacaataaaaccgttgcggctgcaactacccataatttatactttgccactgaaaatggcctccttataagtcctaattgattcgcttattgcgccaaataactatctaggtctgcttcgttgataattggaatctccaatgcttgcgccttggttaatttactgccggcatcttctccagcaatcaaaatatctgtttttttcgaaactgagccggtcactttagcgccgttatcttcaagttgttgtttcaactcaccgcgggtatattgcgatagtttaccggtcaagacaaccgtttttccgttaaagtaactatcactattttcagcttgtgcctttgtcaccccagtataggtcaggttgacttgcacttcagccaattcacgaattaaagtgtgtacttgatcatcagcaaaataagtcgctaagctatccgcaatcgtctcgccaatcgtatcaaccgacataatttcttcttgatcactggccatcaaagcctccatcgtcaagaaatgttccgctaataaacgggctgctttggcaccaacatggcgaatccctaatccaaataataacctttctagcgaattctggcgactagcttcaattgcatttaacaaattattaatagatttttctttaaacttatccagttgcgcaagttgatcggccgttaagcggtataaatcggcaacatcatggaccaatccttgatccaataattgggcaataatccgtggacctaagccgtcaatattcatcgcatttctggaagcaaaatgcgttaactgttccttcacttgtgccggacacattgggttaatacaccgcaatgcaacttcttcatccaaatgaaccaattcatgaccacacgaaggacattctgtcggaatcacatacggttgactgtcagccggccgtttagccagtactacttgtgaaatttctggaatgatgtcgcccgctttgtgtaataaaaccgtgtccaacaaacggacatctttatcacgtaacatatcagcgttatgcaatgaggcgcgcgcgactgttgtaccagccaactggacaggatccatcacagcggttggcgtgacaacccctgtccgaccaattgtccattcgatgtcacgaacaatggttgccgcttcttcaggcgagaatttataagcaatctcccaccgtggcactttaaccgtattaccgagttggcgttgtaaagctaagtcgttaacttttaacacaaccccatcgatgccgtattctaagtcatcccgcgttgcttgatagcgctcgataaaggtctttacctctgtcatattatgacaaacttcagcggttggattgacgttaaagccgagttctgcaagcacttcaagcgcttcgtgctgggttgtcgcttgcacatcgtcaaaggtgacaatcgtgtacataaaggcactcaaatttcgctcagccgctattttggcatctaattgccgtaaactaccagcagccgcattccgcgggtttgcaaatggcggttggccttctgcttcccgtttttcatttaatgccgcaaaagaggctttgggcatgtaacattcaccacggacctcaatagagactggcttggttaatgtttgcggaatcgccttgatggtcttaagattctgggtaatgtcctccccaatcgtcccattgcctcgcgtcgcaccacggacaaattgccctttttcatagatcaagtcaatcgcgagtccatcaatttttaattcgacattatattcgatggcatgctcaacgtttttttgaagtcgattatcaaaagtcgcgagttcttcctcagaaaaaacatcgcccattgataacatcggtacttcatgcgtcactttcttaaagccaggcagaacttgatcaccgactttttgagtgggcgagtcattagtaacaatgattggaaaggccgcttctaacgtttctaagtcgcgatacaattcatcgtacacgtgatcttcaaccactggggcgtcctttgtgtaataggcttcgctgtattcagctaatgtctggcggagttcttgggccgccgctgccgcttcagtttgcgtatattgatcgatcggtttagctaatcccataatgaagactcctcactgtttatgatttgaaacgtgctttttaaagctgactcttgtgcttagcttcgtattgcaaacgaccgactttgtcggtcattcacaacactgtgctaatgctcagagtcaaatccgctttaaacacactctgttttgaaacgtgctttttggttgcaacaacttccgcttagcgctactcgtcaaacaactgcttgcagcagttattcgccgagttgtgctaatcctcagaagataaccgtcggaaacgcactctattctactttttcaattggtgcgaagcttgctagtagtcttttaacgccttgttctttgaaggcgatatctagttcttggtcgttgccggtcccgttgaccttgacaactgtgccaatgccccacttcttgtgttggactttttggccggctgtccaagcaccgctgttatcgccaccagttgtgtcggcaatcttgtgactcgtcgttgttttatttgcattatacgttgtagccgttgcgcgtgcataacgattgctcttaccaaatggcacattgcgttctggaatactgccagcattgccatttgcgtaatccaataatttatcatcgatttcgccgacaaatcgggacgcttggttactttgttgacggccgtataacatccgtgaataagcgttggttaagtacaatttgctttcagcacgggtaatcccaacatatgccaaacggcgttcttcttccagttcgtcttcttctaataaagcacgtgatagtgggaagatgccttcttccatccccatcaagaaaacaactgggaattcaagtcctttagcagcatgcaaggtcatcatggtcacttcactggcttcttcttcgactgaatctaaatcagagaccaatgataattcggctaagaagtccacaaataaatcactgtcatcttcttctggttcataatgttcgtcgaattgtttggtaactgagagtaattcttcaatattttctaaacgactttgcgcttcgagggtgttttcaacttcgagcgcttttttgtagccagtcttatccaataattgttccgttaattccgtcacgtttaaaaattcgcgcatcttcgctaagtcaccaatgacgttgccaaaatcgatcaacgtcttgcgactcttacctggaatggttgagagttccgcattttgcgctgcttcaagtaatgaccattgatgatcatccgcgaattgcgttaatttttcgagagtgccggggccaattccccgtttcggactgttaacaacccgttcaaaactcattgaatcagacgcattcacgactaggcgtaagtaagccaagatatccttgatttctttacgatcgtagaacttatgcccgccgaccatcttgtatggcatgttggctttgacaaacgcttcttcaattgaccgtgattgggcatttgtccggtataaaacggcaaagtcgccgaatttacgttggttcttttgcatttcttcttggatcttcgtaatgacaaagagtgcttcgtcacgttcactttgaccccgataataagtaattggttgtccttcgttattttcagtccacaattccttaggtttacgatattgattattgttaatcacaccgttggctgcttctagaatcgttttggttgaacggtaattttgttccaacatcactgatttagcatctggataatcatgttcgaagttcatgatgttgtccatgttagcgccccgccaaccataaatactctgatcggcatccccaacaacacagagattcttgtatttatcagctaacatgttaaccaatgtgtattgcgcttcattggtatcttggtattcatcaacgtggatgtattggaatttttcttgatagtgttcaagcgttggtttgttttctttaaataagcggatcgtttgcatgattaaatcatcgaaatcgagcgcttgattttgttggagtcgtttttgatattcggtgtagcattgggccacaattttttcgaatggtccgtttgctagacccgcatagtcgcttggtgtttggagttcatttttggcgttactaatcgtgcctaaaatcgcctttggttcaaacttcttcgtgtcgatgtttaaatcccgacaaacatggcgcattaacgtcaattgttcagaaggatccgcgattgtaaacgcgcgattgtagccaatttgttcaatctcccgacgtaaaatccgcacacaaagggcatggaaggtagatacccaaacatcttgagccccttcgccgagtaagttaccgacccgttcacgcatttcacgcgccgctttattcgtaaacgtaatcgccagcacgcgccatggtaaaacgtgcttttcttcaattaaataagcgacccgatgcgttaacacccgggtcttcccactaccagcacccgccatgattaaaagtgggccttctgttgtgaggaccgcttcagcttgcttatcgttcatcccttgtaacaattctttttcagacaaattagtcatccttccgtaaatgcaatcagcctatattataccaaactagataggtagaaaaaagcgaacacgacctagtaaaacggattctaatttttcgcaatcttctgccttgacctgggacgcgtttcataaattatactcaccttaatccaagaaaggtggtatgcatcatgattaaatacattttttctaacttagacggtacattgttaaaccaagacggacagctttctgaaaaagatattgcggctgtcaaagcaagcccactcccaatttccttgatttctgcgcgttcaccacaagaaatgcaagctacgattgatcagttagcgttaacgacaccccaagtcgcttttaacggggggttaatttatcaaccgacagatcttttcccaatggttttagcagaatatccacttgcaacctctgctgtcgcaacattaattgccgcattacaatctgaatttagtgacatcagtttaagtgcgtatgacttacaccactggtacacgcagacaattgacgctagtattgaggtaatcgctaagcaaaccggtcaattgccgacgctcatcaattttagtgatcaattgcaaaatccatttctcaagcttttcaaaattcaactgattatgcaaacgacacaacaacgggcaactgttgctgatttcatcaaccaatgccacttgcctggtctttcagtacaacaatcaggtacaatgaccttagaaattacgagtcatgaagccactaaagctaacgcattaaccaccatcttagaaaacactggactaacagtcgctgattgcgccgcgtttggtgaaggtcaaaacgacttagccatgttatcgctagttggccaccccatcgtcatgggcaatgccagtgatcaaatccagatggcgggtcaattcattacgaagactaatcatcacagtggcttcagctatggtctaaagaaatacattactaaagttaatcaaaaagtaggttaggattatgccaacaattcgtgatattgcccgcaaaagcggctattcggtttcgaccgtctcccgtgtgttaaatcatcaaaaatacgtctctgaacctgccaaaacggcaatcgaagcggtcattaaacaactcgattacgtgcctaatagcttagcgcgcgatttaagcttcggtcaaaataaaaatattggggtcgtcctaccgcacaatgaccatccgtatttcaaccaactcttaaacgggattatggatgccgcgttttcaagcggctatcacgttgtgctcctaccttccgaatataatcaagcagtcgaactagattatctcgaacaattaaaacgtaagaattttaccgcactcatttttacttcacatggtattgcactctcagtcttagcagagtacacgcgttatggtcaaattgtctgttgtgaagacccggggacccatcatatctcggccgtttattctcaccgtgagcccgcctatttagcggcattcaagtaccttaaagcccacaaagcacagcaaattggtctactattaagtcgtaatttagcgcaaagcccgacctggattgccgtcacgaacgcttatcaacaagttttcaactgccaacctgattccgagttaatggtcggtggcatgcgttcatttgaagatggctatcgtgccgctgaacaactggttgaaaagcagccaaccctcgcttgctattttacaaatggcgacgacattgccgctggtgtccgccaatatcatctgaatcatcaactgccgaccccgcttttaattggtcaagaaaaacaattatccagttttttattgcaactgccaacaattgaccatcacttcttcaccctagggcaaaaagcgtttgaagtcgccctcagtaaccatcaccaagtttgtcgtttcgaatcagaatttattttgccataaaaaaagccaccttaacctaacttttaggctaaggtggctttttatgtcggatgcttatgcaaacacccgatcaaaaattgtttgaacttgttttaagtgccattggtaatcaaaggcgtcgtctaaatcggcttttgaaagttcactcgtcactttcggatcggcttctaataattggcggaaatctttttgttcatcccatgctaaggctgtcttcggttggaccaaatcataggctgcttcacggctcagacccgcatccactaacttcaacaagacacgttggctgtaaattaaaccatgggtgatgttcatgtcagccttcatcttttcagggaagaccgtcaacgtcttcacaatccgcgtgaagcgattcaagatgtagtccaataaaatcgtagtatcgggtaaaataatccgttcagctgagctatgtgagatatcgcgttcgtgccataatgacacatcttccatcccggtaatcacatgaccgcgaatcacacgggctaagccactaacgttttcagaactaattggattgcgtttatgcggcatcgctgatgaacctttttgacctttagcaaagaattcttccacttcgcggacttctgttcgttgtaaatgccggatttcagtcgcaaaatgttcgattgaggtcgccacgaccgccatcgtgttaatgtaatcagcatgtagatctcgtgggagcacttgcgttgaaatatcttgggcccggatccctaagtgttctgtcacataggcttcaatttcaggcggaatattggcgaaagtcccaactgcaccactgattttaccggcttcaacgccttttgctgcgcgttcaaaacggtcttgattgcgtttcatttcagcataccaggttgctagttttaacccaaacgtcgttggttcagcatgcacgccatgcgtccgcccaatcatcacggtattttggtattcgtaagctttatcttttagaacagccataaaattggcgatatcagcccggattaaatcgttcgcttgtttcaaaatatacccttgtgctgtatcaacaacgtccgttgaagttagaccatagtggacccactttttttcatccgctaaggattctgaaacggcacgggtgaatgcgaccacatcatggtgtgtgatggcttctaagcgattgacttctgccaaatcaaagctagcattcgcgcgaattttctgcgcatcctctgtgggaatatcgcctaattttgcccacgcttcgacagctagaatttcaacttccaaccaagcttgataccgattttccgttgtccaaatggcgcccatttcgggacgtgtataacgttctaacataaacttctcctccaaatactacctaaatgctggtgatggtaaaacgtgctttttgtggcatctttctgtgcttaaccaaatttgccaaattcgcgattgcatcaccaactcgtcaaatccagttaatgctcaaaagataaccgccacaaatgcactctgttttgaaacgtgctccatcgggcatctttctgcggctagctacgtccgtccaacgatcgactgcgtcgctcattcgccggcctatgctagtcctcaaaagataaccgcccgctgtcgcactctaatataagtctgccgcttcgtaattatcgattaagggttggatggcttgtccggttgctgtgaccgatccaatctgttgattggtcgtgacgttgtgcaaattaaagtaccaatccggtttgatcttcatctgtgtttgaattaatgaccgttgtgcttcttgaatccctaaggtcatccccgcattattgaggcgtgatgggccgactgccaactgacagatggccttcaaatgatattcatattgcgagaaattcaaggtatgtgtcaagacatcgcccgttgcgtgcggtgttggcataattcgtttcacataaatattcatagcgggtgttaaaaagaattcaaccccaaaaacacctgtatagtctaatttttccccaattaagtgggctaatcgattaatttcagtcgcaacatcttgattaatccgtgctggcacaagcgacattttcaagcgatgatcttcaaactcattttcgatgactggcagtgtcacacacttaccatcttcagttttaacgaccatcactgatagttcttgtgcgtcgggaatccaagattccaaaatataagtccccaactcaagggcagcttcaatgttttcaaggtcactcggttgttgaataaaacgttgatactgcttaccgtaacctttttgaatgggttttaagatacatggatatccgattgaatcgattgcatcttgaatatcatctacatcaacaactgtcgcatagggcggaatattgatatttaaatcactcaaaaagactttttcgaggtaccgatcttgcgtcacagacaacacattactgccttgaggtagataataatgttgtgccagttgttcgagcactgtctcatctaataattcattcgtataggtcaacacttgactgacttcaccgagttggactaatgtttgataatcattgaattcaccatcgatctgactatcaattaaacgtgcaaatgaggtattttgcatctgcggggtcacaatcgcggctacccgataccccatttcttttgctttgagcgccaacatataggcccgttgatcatttccaataattccgatggtttgtcctggataaataactggcatcatattacctgctttcctgttcaccaaactgtatacccttattatagcgaatttaagcgttgtctgcctaatactttcctccatgataacaaatttttagacaaaaaaagagtgcctctcagcactccgttaaataacatttatttattttcgtctaaaaagacgacttgaccgtcttcaaacgctgcaattcgtgctaaagattccacttgaatgccacgttgatctaacaattcgcgccctttttggaaagtcttttcgatgacaatcccgacaccttcaagttgtgcgccggcttcttcaataatagaaagtaagccttcaaccgcttgcccgttggctaagaaatcatcaatcactaaaacgcgatcgtctgcattcagaaacttcttcgaaattgaaatgtggttattcactttcttcgtatacgaataaaccgttgcactgtacatgttatcttgtaacgtcaaactcttgtgctttcttgcaaaaacaatgggaacgtggaatgctaagcccgcgaaaacagcgggcgcaatgccagatgattcaaccgttaggattttagtaatcttcttatccttaaataagcgttggaattcttcacccattgcagccattaaatctggatccacttggtgatttaagaagttatcgaccttcaatacgtcttgacctaatacttgaccatcttttttaatgcgttcctctaatagtcgcacgctgagctctcctttgtagcatcgttaaacatcactactgatagtagtaacgactaataatgttttctgaaattgaattaaaaatagattaccacaaaaaaagcaacacaacaagctcaaatccagttattcagcgattggaaaagagcctgtcacaaaccggaatttgtggcaatctcttttgagattaattagtagcagatttcccatgatttgtttcatagcattctttattgatcatattggtcgaggtggtaagccttaacgagctcaattaacttcgctggataatcagggtcagtcgcatagccgtcttgttgtaaagcatgggcagcttgctcataattagtggccgcgattacgtgtgcatactgcgtccggttccaagaggtcccataagcaaacaattgtacatggtcaagcatcgattcttgataattgttatatactctaaaacgcgctgttgtcgttacccactgaccatttaaatattccttggtcgtcatttccttggtgttggcctcattatcacccttaataccgaaataattatggtagtgcgtagcaagtgagctcttcccccaatcactttctaaaatagcttgcgctaaagtaatacttggtaaaacatgatatttcgtctgtaattcttgggcatatggcaccatttttttaataaacgcttgcttcttagcttggcgcgattgttgttcctgtctggcttgatcggcaagttcttcttgggccttttgtccattataccgaactaataaaacgagcccaattccgagaataaatagactcactaaaacgaccactagccaatcggttgggtggcgtctcttcttagagtagtagttagctgttggtttgcgttttgtcgtcttgcgtttacgtttttttgccaatcctctgcctcaactttatctgaatctattctatattgtacacaaattcattcagaacaccaatctttaatttgtaacccccctttaatttctatttagcgcttttattgctataatattggctgtaaccgattacgatagtaaaggactgattttattgacaacgcttaactggggaattatcggcttaggcaatatcgccaatagtttcgcaacttattttaaccaacctgatggtcacatttatggggctgcttctcgttcactcgataaggcacaagcctttgccgaccaatacaatattccacatgcattcggtagttatgccgacatgctcggtgatgacaacatcgacatcgtctacattgcaaccccccacaattatcacttcgaaagcattatggcgagtcttgaagccggtaaacacgtcttctgtgaaaaagcgattacgatgaaccgccgcgaactcaatgcagcaaaggctcttgctaacgaaaagcacttgatattagctgaagcaatgaccatttatcacatgccattgtttgctgagattgaacgccaacaagtcgctaatcacttaggcgctttaaaatcaattcaagtctcttttggaagttataaagagcttgatccaaacaatcgcttcttcagtcccgcacttgccggcggtgcaatgcttgatattggtgtttatgccctctcatttgcacgtcggatgttaactgctaaaccagaacttgtagcgacgcaatgggtgccatcagaatccggtgttgatcagcaatcaacattacttttaaataatgccaagcatgaaatggtgactgttaccttaaacattcatgcgaagatgcctaaacaaggtgttctcgtttatgaaaatggctatgtcaccgttgacgattatccacggcctgacaaagccaccctcactttcccagatggtcgcgttgagaccattcaagcgggtgacgcaaccaacgcaatgaactatgaactccatgatttccaagaaacagtgcgcggaaatcaatcaaacgataccctcgaattatcaagcgatgtcatggacatcatgtcagacgcacgtgctgaatggggctttgtctatccatttgaaaaacgcactgatctcgattaatccattcaaaaaacctggccaatttggtcaggtttttttagagtattttagcgagaaccaccatatcttttaggcgaatcccattttcatagattggcgtttgatattggtcgaagaagtttttgcgaatttgttcgaaccgaaagccttgacgcaaataaaaaccaattgctgccaaactgccgtccccagtgccaactagcaatgattgaaacccttggtcaattgcaatcgtctgaatttgagtcatcatttgcccaccgaatcctcgatgctgccattctggccgtaccgcaatatttttaagttctacctgctgattgttgagtgccatcagatggaagaccccgatgacttgctgctgatcgcttacggtgtaaaattgcccatgcatcaaatagcgttcaatcatgccgacttcttcatccgctaacaatagatcatccagccactgtcgccgtgctgcgccctcaatcaattgatacgttaacatctccagctcaccacccaatcaaaaaaaggggtcgcgacaaaattgcttttgccgcgacccctaggttaatttttaaattagtttttgtttacgttaacagcttgtgggccgcggtcgctttcttcgatatcgaaagaaacgctttgaccttcttcaagagtcttgtagccttcaccttggatagctgagaaatgtacgaatacatcactaccatcttcgcgagttacaaagccgtaacctttttctgcgttaaaccattttacagttccgttttccatgagaaaaatcctccttgtgtcgatgacacattataaatttgtgtatttctggtggtccgatggaagaaagttcttttggaaacattcgtaccgcaaccattcaaaaagtacaaacatagtgtaacacaggcaacaaccattggcaaccatttggcaataaaaataaaccgttttctatcacggacaatcagcatccgtgtttttagacaagtgttattttatatgttgaatcatgccccaaatgatttggctttttgctttaattacgttaagatagcagtataactttttctcattggagtgcttgcttatgctaaaactattgaaacggctattaccaattatcttcatcggggtaagcctagccgcttgccaaaaaccgatggatactaaacatcaactccaatccgatatgcaaaccgttgaagatgcgactaagcaacaacgaacagctctttcaaccctcgaaacaatcggcgatccagttcctgataactatctcacgattcaaaaaaaatatcccgacgaaaatctattaacgattgaagatactaagattgcgacgactgcggccaagcgcgaagcagcctttcaaagtcttaaagaacaacaagctgtgctcaaaccggtcattaaacgcctcaccaaactggtcaagcaagaaaacgatgaattgccgattgaacaagtcaaagatttaaatcaaagtcttaagatttcgacacttgattatacaaccttggccaccttctacaacgcggccactaaagcatctgatgaattttacagcgaccatacagatgctgatgcagacgaagacagtcttaaatcaccaatcaatcgtttaaatcaatattacagttcagtttatcaacaagccgaaattgctaaggtcaacatgaacacagttgctgcgcatgctaagaaagtgcaaaaacaactggaataaacaaaaaaggagttggacaaagtcacgtttgtccaactccttttttcaatctttaattattcaacccgtggcggaccacaatcgtcggctgtagctacccgcacttgttattgcgtccgtttaaaccgcatgagtggtgttgcgactagtggtgtcaccacagctgctaaggttgcttccattacagcatttaacgcaacaacgccaagcatcacgatgattaaatgggtcggatcagtatgatacatccctgccgcttggtgtccgtaaagcacacgcgttaagccaatcactaaaatggtattgattaaagccccgaaaatcccagctaaagccattgcaccggttttacgaattttagtttgatataagtgttggaacgtaaagccagcaatcatcccagccatcaaccgcggtaaaatagcgataattggattttgaaagattaaaagtgaaagcggatcgcctggagaggtataggctctaaataatgaaatcaaaccccaaattaatcctagaatcgccccttggcgtgtgcccaggatcacggccccaataatgaccgttaaatgaattgttgttacggctggtagcccaggaatgatattaatataaccgaccatcggaataaaactttgaatgattaaaaaagcggttaaaatcgccataatactaatcgtataagctgatgaatttttatgtgtcatcctaactgactcctaaactgaatttattgctcattatagcgatttgtcaccctagtttcaatcatttacatcaagggacaaaaaaaggtaattccaattggaattacctaactgaattatgatgcgggtgagaagactcgaacttccaccgggaaaattcccgacaagatccttaatcttgcgcgtctgccattccgccacacccgcgtaacttgctttatcactttaagccacgtacattagtataagagaaacgatgattgaagtcaattaaaattttactttggagacgattacatgcccattatccccgctaaactaaccgatattgccaaattaaccaccctgtatcaacaattaacgactgaaatgcatgtgctacaacccactaattaccaagctgattacacgcctgagttctttgactggcaacaaatgataactgatccactacaagcagtctttgttcatcaaaaccaagatgcgcaaatcgatgccttttgtcacgttacaacagtccaaacaagtccctcacccttgtttatcgcacaccgctttgcttatctcacaacactgtatgttgcaccagaggcacgccgccaccacgtcgctacacaactgctatcgtccgcaaagcaatggcaacaaacacaagcgctcgattatttagaactaaccgtgttagggaataatccggctgcgttggccctctatcagaagctgggctacaccactcagaatcaaactttacgcgccaactaaaaaaaggccacccctaaacataggggtggccttttttcattgaatttgtgtggtttgataaatcagtcgtccatgacaccgccgacaaacatagcgagccgtattcattcgacggcgacgtggatagacttgcccacagtctgaacatttataaatcacaattttgctcgatttagctgtcttttgtgcagctggtgcatagcgcgcacccccgacttgtgcaagtaattgtttaaactctgcgtctcgatgacggtaaccgcgatgcaacagatgcaggtgataatggcaaagctcatgcttaatcaccccttctaaggtctgtgtatcatgttcggtcaacatctttggattgatatcgatatgatgatcctgtaaatgatagcgcccgccggttgtttttaaacgccgattgaaatttgcttgatgcacaaacggccgattaaaaaactgcaacgataaccgttcaatcaattcagttaaggcttgatcagtcatttgcctttggcgctttcattgtcagttgtacgcgttcacgttcttgatcaacactcatcacccaaacctgaacgacgtcgccaactgccacttcatcagaaggatgtttaacaaagtggtttgccagttgagaaatgtgcactaagccatcgtgtttcacaccaatatcgacaaaggccccaaaatcaatcacgttgcggactgtaccttctaacgccatattcggtttcaaatccgccaaggttaagacatcatgacgtaacaatggcgccgtcatctgatcccgtaaatcacgccctggtttttgcaaactacttaagatgtcggtgattgtttcaatcccgacctctaattcagccgctagagccggtacttgcatttgtgcaatcgccgtcttcaacgcatcgcttcctaaagcatcaacggttaacccaaatgatttcaaaatggctttagccgttggataactttctggatgaatatcagtattatcgagtggattgtccccattaataatccgcaagaatccgaccgattgttcataagctttaggccctaagcgtggtactttcttcaaagcactccgcttttgataaaggccgttttcattgcgatattgcacaatgttttgagcagtagttgctgacaaccctgagatatgttgtagcagctgagggctagccgtattcaggttgactcccacactattcacgacatcctcaatcactgtatcgagttgcacagtgagctctttttgcgccacatcgtgttgatattgtccaacccccactgcttgtggatcaatcttgatcaattcagctaacggatcttgcaaacgacgggcaatactaatcgcacttcgttcttcaacgtgtaaatctggaaactctgcccgtgctgcatcactcgcagaataaacagaagcccccgcttcattgacaatcacatagaaaatttcccgggaaatagatttcaaacacgtcgttacgaattcttctgattcacgactcgcagtcccattaccgattgcaatcatttcaacttgatatttctcgagtaaagcagtgaattcatccgccgcttttgatcgtttatcagctgaagctggtttgtgtgggtaaatgactaacttatccaagaattttccagtgccatcgacaacggctaatttacacccagtccgataagcgggatcaaagcctaatacaactttacccttcaatggtggttgcaacaagagatgcttcaagttatcaccaaagacactaatcgcttgttgatcagctttttcctttaattgcttgcgtaattcacgctcaattgccggtccaataaaccgcttataggcatcttcaaccgcagacttgatgaccattgctgacgctgaatcttgtccatacaacagatcttggctgatccgactggcaattacttgatcgtcaatcataattttagctttcaaaataccttcgttttcaccacgattaatcgctaaatattgatgttccgctaccttcgttaaatcggcagtgaaatcataatagatttgataaacttgcttctcatcggctgcttcgtctttaacttgactggccaactgaccattttgccaagtatattggcgcacccaattccgatattttgctgtttcactaatattttccgccaatatttcatgaacaccagctaaaacagcagctgtatcattgattttttgatctggattgaggtaagcttcagcttttgccaataatgcttgttcggttaagctaggtaaccctgcgataaactgcgcaaaaggttccaagccggcttctttagcgatggttgctttggtccgtcgtttttgtttatagggtaagtacagatcctctaaagcttgcagttgcgttgccgtttcaatttgttgtttgagttttggcgttaatttttcttgttcagcgatatttttcaaaatatcggttttacgtttttcgagcgtcgttaagtattgaaatgtgctttcaatttcacgaatttgaacttcatcgaggcttcccgttcgttcttttcgataccgcgcaacaaacggtacggtattgccttcttctaaaagacctaacgttgctttgatttgttgtggtcgatactgtgttaattgttgaatcacaagattttgaatatcaggcatctgattgcactccttttgcttcaattaaaaaaacagcccccgacttgggaactgtcaactttcgccctaagcgattcttgaaatattttggatgtatttagaaatccgttccgttgctttgtcttgattcatttctgaagctgcaaaagcttgcatatcaacggtttgatcatcatgcatgcttgtaattaaatcttcacagccttgaatgaaatcagcgtaagcaccgattaaacgttggttgttccccatcaaacgagcgggcgcaacaactgttttgaattgtgctaagaattcgtgatattgatcaacaccatctctgaagatttgtgctgtcttttgatagtcttgttcgctcatttcggctaacttaccatcagcaacggctgcttttaaaggggtgaaatacttactcatcccttcttgtactttttcagtattatcgattaaatcgttgacagcttggccgtatttggcaagcttttgttgcgttttattcatgtccatcctcctagtttcctatggtttagtatactaatttcccaatcggcttgcaattaaaatattaaagcatgtgtcattaatagaaaaggcatgcttagttcatcaaaggacatttacctcattaaaaaaacgctagcgacaaaatctcgtttgtcactagcgtcgattattacctatcttctcttcaacattctactcgtccacgactgaccaaacattaactttgtcaataagtcgatacaagcgaaaataactaaataaagtaagaaactcaacaaccaattattttgaacgtgagtaatccgttccagaccaccaaagatgaaaagtgatatcagaaactgtaagaatatttgcatacgtaatcctccctacaaaactcactaacataaaagttatttaatcacctttattatagtttaattgacaagcactttacaaggtcggcaacaaattatttagccattctccgctggaagaacttcacaatttccacaatcacaatcaatgagaatgaggctgctaggacaattccccattggtgaatatcgagatgtgacacgtggaataggccgtttaagccaggtaccataatcgttgcggctaacaggaggaatgaagctaagacagcccagttgaaagctttattcttgaaaaagccaactgtaaagattgattggtgcactgacttcacgttaaacgcgtggaagagttgaatcatccctaacgttgcataggccatcgttaacgcatcagcatgtgctaagccgctcgcttgatgcactgggtacgtaatcgctaaggcatacacaccaagcgtaatcccaccttctaagagaccttgatagataatcgcttggaagacaccgccggagaagaagtttgacttgcgcccacgtggtttttgattcataatccccggttcagtgggctcaacccccaacgcaatcgctgggaatgtatccgtcactaagttaatccataagatgtgcaccggttgcagaatttgccagcctaaaatcgtcatcatgaataaggtaaggacttcacctaagttagctgacaataaatattgaattgatttttgaatgttggcaaagactttacgaccttctttaacagccacgacaatcgttgagaagttatcatcggcaagcaccatatcactggcgccttttgatacttctgtcccggtaatccccatcccaatcccgatatctgcggacttcaaggctggcgcatcattgacaccatccccggtcatcgcaacgactttaccatgtttttgccaagctttaacaatccgcaccttatgttctggcgcaactcgcgcataaactgcgtactgactgacttttttagcaaatgtctcgtcatccatttgatccagttcggcacctgtcacaacggccgcatccgcatcttgttcaggtgtaataatccctaaacgaagtgcgatggcttctgcagtatcccggtgatcaccggtaatcattaacgtccgaatccctgctgaatgcgcatcagttacagcttgtttggcttctggtcgttctggatcaatcatcccgactaaaccagcaaagattaactcatcttcaatcgtcggatcaattgttgctggtaagctatctaacggtttatacgctaatgccaagacacgtaacgcttgtttagctaaatcgtggtttgttttgagtaaaaattgccgttcatcttcatctaacggttgaacatcgccattggcatcaataaaatgactcacgcgtttgagtaattcatccggtgcacccttagtggtcattaataattgaccatctttggcttgatgaatcgttgtcatcagcttccgttctgaatcaaacggtacttcacccacgcgtggtgctgctgctagggcatcttggatcacgaaacctttatcacgcccataagcaattaaagccgtttccgttggatcaccaattaactggccatcctctgtgattttcgtatcgttggcaaggttcataatgcttaacgctaaatcatcgcctgccaagtcggctgatgcttcttgcaactgattattggtaaaaatcttttctaccgtcatttgattcatcgttaacgtcccagttttatcggacgcaataatgtcggtactccccagtgtttccacagcaggtaacttccgtaccaacgcatttcgtttaaccatcttctgtgtcccaagggctaaaataaccgtcacaattgccggtaatccttctggaattgcggcaaccgctaatgagattgaggttaataacatattaattggtgattgcgcgtggcgtaagtagccgaccacaaatacaacagccgcaatgattaaaatcataatcgttaaactcttaccaagttgacttaaattcatttgcaatggtgttgtggtttcaccagcttgatttaacatcccagcaattttaccaacttcagtttgcatcccagtgcccgtcacaaccccgacaccacgaccgtaagtcacattactattcatgaatgccatgttggtccgatcgccaatcccactttcaggatcggttaacgttgcaacagtcttatcgaccggtaccgattcacccgtcaaagccgattcctcaatcttcaaagccgctgattctaacaagcgtaaatcagctgggacgatatcgcccgcttctaatagcacgatatcaccgacaaccagttcttcactcttgattttaacaatctgcccattacggcgtacatgtgcgtccggggttgccatctcttttaaagcatcaattgcttgttccgctttggcttcttggaaaacaccaaaaacggcattcaagataacaacggcgagaataataatcgcatctggccattcatgtgctaaaaagccggcaatcattgccgctactaataagacgataatcatgaaatctttgaactgttctaaaaaacgaacgaacaagctttttcgtttagtctcagtcaactgattacgcccgtatttagcgagtcgttcagcaacttggtcttgcgttagcccatcagttgttgtggctaaactttttaaagtctcatccgttgattgggtaaagaatgaacttggttgatctgtcattgtcgtgcctcctatagatagatttcggggtaaaaaaagagacctatagagaattcaaagaatcccccataagtctcactaattaagataacaccagaatattgccttgttggtggcgttatcgcagacaagctgccagttactcccttatcgttaaactcattataagacagaaccaatctaaaacgcaagtaaaacattattctgacgtccaattaatttagcggctaaacgaaatccagccgattaacgccaaaatgtatcaaaaacagtaattggtaaatgccgcttgtgcgctgtcttttggtaccacttttcaatcttggtagcagcctcttctgccacttcacgaccctctaaataatcatcaatttgattataagtgacaccgagtgctaattcatctggcaatgctgggcggtcttcttcaagatcggcggttggaatcttttcgtaaaggtgttttggtgcctttaattccgccagcatcgctttgccttgacgcttatctaatctgaaaatcggtacgagatcagcaccaccatcaccgaacttcgtatagaaaccggtaattgattcagcagaatgatccgtgcctaaaaccgcacccttcatttcaccagcgataccgtattgcgcaatcatccgcacacgtgccttgatattacctttattaaaatcactgactgtcacttctgttttcgccagtgcttgaaccattgcatccactgacgctttgatattcacacgccggacctgatccgcttgcatgaaatcaatggcagccattgcatccgattcgtctgcctgctcaccatatggtaatcgaacagcgatgaattgataggtttcatcacccgtttcagcacgcatctcacggaccgcttgttcagctaaagcaccgactaatgttgaatcttggccaccagaaatcccgaggacgtatgtttttaaaaatgtattcttttttaaataatcttttagaaaatcaactgaccgtcgaatttccgctttcggatcgattgtaggttgggtctttaaggctgcgataatttcagcttgtaaaggtctcatgattaaataccaccttttttaaatgttagattgctaacttttttgaaacgcgcttccttcaacagctttgtccggcaaataagcgctagcgcacttattcaccagacttcactatactcaaaagctaaccgttgaatgaaccactctgcttagagcgcactctgattttggacttcttctttgactcttctgatttgggccattttgtgatcccatgtgcgttgtgaaaggtcaactgggtaatcttgcgggttcaagtcccgcttgtattcatcccataacgagtcgagattttcactacagaacttcttaatcgcgccaagttcgggcaatttgtaaacgcgttgcccgtgttcaaaaatcgtccgtagaattggccgcgcattaaagtccgtcacagttttattaatgtacgtgtaatttggatggaacatatagattgaatcttgttccagtggatcttcatcccaaagcgtaatgtaatccccttcagatttaccatcaacttttttagtgattcgccaaacttgcttgcgccctggtgtggaaactttctcaacattacttgaaagcttgatggtatcgaccatcttcccgtcgccgttttcaatcgaaacaagcttatagacagcccctagcgcgggttgatcataagccgtaatcaatttcgtgccgacaccccaaacgtcaattttggcttcttgcatcttcaagttttggatggtcttttcatctaaatcatttgaagcgtaaactttagcatcggtaaaaccggcttcgtccaattgttggcgcacgcgttttgaaatataggccatgtcgccactatcaatccgcaccccttggaagttaatcttgctaccaaattcctgagcgacccgaatcgcacttggcacaccacttttgagagtgtcatacgtatccaccaagaaaacacaatcgtgatgcgtttcagcataagcgcggaatgcttcataatcattgcgatagacttgtacgagtgaatgcgcatgcgtcccactggctggaatcccaaaaatctttgaagcgcgtacgttacttgtagcgtcaaaaccgccgatataagctgcccgagtgccccataaggcagcgtccagttcttgggcacggcgcgtcccgaattccaaaacaggatccttaccgaccacagatttaatccgtgcagctttcgtggcgattagtgtttgataattaatgatgtttaacaaggccgtttcaattaactgacattgcgccaatggtccttcgatttgtaaaatcggttcattcccaaaaaccaattcgccctcaactgctgaacgaattgttaaatcaaaatcaagattggctaaataatcaagaaaatcagctggataccccacctcatcacgtagataagcgatgtcactttcggtgaagtgtaagttttctagataattcacgatgtgttctaaaccagcaaaaattgcgtaaccattttcgaatggtaattttctgaaataacattcaaaaactgctgtgcgattgtgcaagtcctttttaaagtaagtaagcatcatattcagctgatacaagtctgtatgcaacaaaagactgtcatcagggtataagtttggcatgttaagctcctaattagagatatatttggtataactatatcataaaataaaagaggcatacaaaaaaagacggtagaaaaccgtctttttttgtttgagactagaagaaacgccaaccccatttattaaaatactgtgccatggacttcaagaagatcttaaatcccttgaaactgcggtgggatgccattccataaaaatgagtgacaaccgcgtctggtacatataaaatcgtatgaccgctttggttaattcgatcacaaaggtcattatcttcgaaatacataaagaagcgttcatcgaaaccatcaatagcccgaatcacatcagtccgcgtaaacatgaacgcaccagatccatattgaatcacttgccgtcgattcgttaaatcccggcattcataagccgccaagcgcttttcaaatagcttcttaacccatttaaaaggtacaaagcgtagcatataatcgaagacatctagcttccgccgtactaaatgttgggtcgtaccatccggaccaacaatcttcggtgttagcatccctaagctatcattagcatcttgatccgctaaaatccgatacatctgttcaaatgcgttttgatttaaaataatatccggattgcaaatcagaaaataatcggatgccgtcagcttcaggttggcattatgcccatgaccgaacccaagattctcttggccttcaatgatttcaacatcatctgcagcataggcttttaattgcgccaaatactcaggtgttgagccattatcgtgaaccaatacttttaccgggtattgccccaagacagttgccttgatactatctaacgtcttaaagacgtattgactattataggtcacaatactaatcgtcaccgttttatccagattattactcatcatctcatcctaatcgatttttgccataaatttttgtaatgcatcttgccaggttggtacttcaaatccagttgctttgatcttcgttaaatccatgattgaatgtcttggacggaatgctttttgaggatattcgtctgatgttaccggactcacttctacgtctttatccttcaagatttcgaccattatgaaataaattatgagaattagggcttatctaatgcaaaaataatcactatcgtttacaataagtaagtattaaaaatggaatggggtaaagaaatgacaattacatatgtcgtcatcaacatcgtgatcatgctcatcatgttatttgttttaaacaagatggcccggattcacgttaagtttagtcgccgcgttttcacggcattgggggtcgggattttattcggcgcactcttacagattatcttcaaaacagattcaacggttgtcaaacaaacagctgattgggtcggcattgtcggcaacggttatgtctcgttcttaaagatgatcgttatgccgttagtcatggtttcgattattcaagccattacgaacttggaatcatctaaaggcttagggaagatggccggcatggtcattggaatcttagtctttacaaccttaatcgcagccacagttggttcagtgacagcggatgttttcggcttaaatgcgagtgatattcaatcaggccaagtcgaaaaggcccgctcgaaagaattacaaacgaagctaggcgatgtacaggaacaaactgttcctgaaaaaatcgttagcttcattcctgaaaatccattcatggatatgacgggttcacgacctacatcaacattagctgttgtgattttctcagctttcttaggagtggcagcattacaattacggcgtaaaaagccggaacaagcagaaatgtttaataaaatcgttaacgccttgtacacggttatcatgcgcatggtaactttaattttacggatgacaccttatggggtgttagccttaatgacaacgaccgtagcacaaactaatgttaaaggaattctcagtctaggtgagttcgtgattgcctcttacgtggcattaatcatcatgttcttgattcacttcctattaattacgttcacggggttaaatccaatcaactacattaaaaaagtgattccaacgttaatctttgcgttcacgtcacggacgagtgcgggttcaattccaatgaacattgaaacccaaacgaaacgtttaggggttgaagatgggattgctaatttatcggcttcatttggggcttcaatcggtcaaaacggctgtgcgggtgtttatccagcaatgttagctgtgatgattgcaccaactgttgggattaatccttggagcatcggtttcttggttaaattaatcttgattgtggcaatcagttcctttggggttgctggtgtcggtggtggcgcaacatttgccgctttaatcgtactttcttcaatgaacttaccagtcgggttagccggactattaatctcagttgaaccattaatcgatatgggtcggacagccttgaacgttgatggctcaatgactgctggggtcttaacggctcacttattaggtaaattggataagaacaagtttaatgatatgagtttgacggaagattcagacgaaatggcttaatttcaaaaaatggagggtttagtgatgcgaacgattattatcggtgccacagctgccggaacaagtgcagctgcaaaagcaaaaagaacgaatccagatttagacattacgttatacgaaaaacgggactatgtgtcctttggggcttgtggcttaccttattttgttggcgagcactttgaagatcccaaccaaatgattgcccggacacctgaaaaatttgctcaacaaggtattgatattgcgcttgaacacgaagtactatcagttgactttgatgcgcaaacaatcgtggttcgggatttgaaaaccaatcaagatcgcacagaatcttatgatcaattaatgttagcaacgggagccacagctgtgatgccaccgattaaaaatgttgatctcaaaaacgtctatcatctacggacgatggcagatggacaagccttacgtgaattaggacaagacccaaaggttcaatctgtaacggtgattggtgcgggctttatcgggttagaaattgccgaagagttccatcaattagggaagcaagtccgggtcattcaactagaagaccgaattttaccactggcttttgatccagaactaacggacatgttcgcggatgacttacgtgataacggcattgaattacacttatcagaagctgttcaagccttagaaggaactgttcaggtgactggcattgtgactgataaggggcagtatgcgacagacttagtgattgtagcagctgggattcggcctaatacgcaattcatcacggatgatcgattgaagaagttgccaaatggtgcgattattgtcgatcaagcagggcggacatcgattgaaaatgtctatgccgctggcgataatgcaacggtcattaacagcgtgacgaaccaaccgatgtattcagcacttgccactggtgccaataaattaggccgaattgtcggcacgaatttaggcgggcaagccgctcaattaccagggatgttgaattcagccggtgtgaaattaatcacgctagaagcgggccgaacaggtttgactgaaaaagaagcggcagaggctggtattgatttcagtactgttttaatccacgacaagaaccaaacgaattattatccaggccaatcagatttaacgattaaattgatttacaccaaaacagagcatatcttaattggtggccaggtggttggtcaaaaagacgcagtgttgcgcgttgatgtactcgcaactgcgatccaagcgaagatgacaactgaacaactcgggttactcgaccttgtttatgcaccaccgtttgcaagaacgtgggatgcactgaatgtggccggcaatgttgcccattaattaaaaaaaagtgacaccgcacaaaccgtgtagtggcgctttttttgttgcatgcttaaacagttgttcatagtgtttacttgaatgtttactcgggtctgtgctaaaattgcatttagaaattaaatttttgcaaagttagttatgaattaattacgatgattaagaaaacacaaataaaaaatttatcgacaggagacagtttaatgaacaacacaaagagtttgattgcattgagttctggaattttaggggcagctgggatcggtttattgagtgcagggcaagtacaagcagcaacgacagcaaccgtcaactacgcagatggtgcaacaactgtttggacaagtccaacaactggtcaaactgctaaacgatacatctttaagggccaatcagtaaatcttttagcatcacaaaagattggcgctgaaacatggtaccgaattggaaacggcgaatgggtacctgaacgttacttaacaaccagtgacgctacaccagctgaaacaacaccagcaacagaagcacctgctgctcaaaagacagctcggattgcctatgccggtggcgcaacaactgtttggtcaacagcaacttatacagccccaacaggccaatacttaggttatggtcaaaccgtcaacgttgtgaaaacagaaactgtttctggcgaagaatggtatcaacttgaaaatggtagctgggtaccagctcgctttacaggtgatggtaagattgaagccacaccaacgcccgttgcacaaccggtagcaccagcacaacctgcaacagcgactcctgtcgaaacaccagctgcgccagcaccagttgcaacaacaccagcgcaaacagaaagcacgcctacaacaccagcacctgtcgcagaaagtgaatcaacaccagttgaaacgcctgccacactagaaagtacaccagctgtagcagaaagtagtgcgcctgctcaagcagaaagtacaactcaaacacaacaaccagctactcaagaatcatcagctcctgtccaagaaactgcaccagttgaaacaacaccagccccaactcaaaaggcaccagttgaaacaacaccagccccaactcaaaaggcaccagttgtaacgacaccaacaccagccccaacggcacctgcagcaacgactggtaatgcgcaagctgttattaatttagcgatggctcaaattggtaaaccttacgtttggggtgcccatggtccaagtagttttgactgttctggattaatggactatgtcttcagaaatgctgctggtaagagtatcggtggttggacagtccctcaagaaagtgccggttatgctgtttcattaagcaacttgcaacctggcgatttattattctggggttcacaaggtagctcacaccacgttgcgctatacattggtggcggacaatatattcatgccccaaaacctggcgaaaacgttaagatcggttcaatgcaatactatgcaccaagttttgcacgccgtgtcttttaatgattgcaattaagcgaacatctcacctaggtgggatgttttttgtattttagccctaaataagctatgatatgtagagatttaaaaaaggactgacgagatgaagatagaagtacaagcatttatcaatcaaattcaagatcaaacatatttaacggatgaatacgagctccccacgccagatccttttgtggcggacggtattttggcacagttaaaacccgctattgataaagccattgaaaaacaagctttggcctctttttcggtgctgacagaatatgctggcgaacccgttaaggtgacattggaaacggggattgtgaatctaccattacaatacattaaaaaagtaaatcaattttttgaactcgacgaccaagcagaggtgaatctttatttatatgtgacatcgccactcattaatcgctcgaacatgcggattgacttaattgggacggtagcttcgtttgaagaatcggcagctgctaattggacgaagattgccgacttgctaacaaaggacttggaagccgtcgtaatcggttcacaggcgcctaaagaagaaccagtcgaaaagaaggcgcccgctaagaagaaagccgcacctaagaaaatggcaacgactaagaaaaaagcgcctgccaagaagacaacagctaaaaagacagctaccaaaaaagcaacgactaagaaaacaaccaccaaaaaaaagactacgaaaaaagcagactaatttagtctgcttttttgatggcgtctattaaaggcaagtcgccgttaacaaacgagaatttcttgtggattgtttcggtcggatgttctaagacggtgcaaatcatcgcagcgacatcagcacgtgcaacttgtccaccagatggttgcattgtcactaggccggtagcttcgtcgtttgtaagtgtcccaggacgcaagatggtccaatctaaaccagagaattcaagccagtgatcggcatagtattttgcagcgtagtacggtttaatactttcaggccatttagttcgatcctcaacaaagagtgcactgaccatgacgtagcgactaacttcagcaatcttagctgctgccatactcttaacggcgccatcgagatcaaccaacagtgtttgatcatcgcctgttttaccgccagaaccagctgtaaagacaatcgcatcatgatcggcaaatagtggtgctaaagccttaggttgtttggttaaatcgaataagacaggcatggcccctagttgtgcaagttcatccgcctgttgttcgacacgaatgccggctgtaacggtgtgaccggcagcaacgagttggctaattaggagctggccaacgttaccatgggcgccaataacaaaaatccgcatagtaaaacctccaatataaatgtgtgtgctgtccattatagtagttattgaacagtgacgcaaagatagtggatttaaaaacctgtgttgtagtacaataaaattcggcaccttgcgaaaaaatgagtgtgctttagggtatataatcttgaaagtggctgatggcaacctttaaataggcaaagctaattatgggattcgttttataaataaatctaagaatcctctcattttttcacaaagttgcttattagaatatcatgaagccgtgtttgttttgtgttatggtacagatatagagattgtgatttattggataagtagtcctatttgttaatgctatctcagaaagtaggaggagaacatgacaaatcaatatcggagcgtttttgatatcattggaccgattatgattggcccttcaagttcacatactgctggcgcagttgccattggacatgttgctaatcgtctttttcatgcaccgattaacaaagttattgtgcgttactacgaatcttttgcacaaacccaccaagggcacggtaccgattatgcaattattagtggcgtgctaggattcgatccggccgatcaaagggtaccaatggcagttgatttagcgcgacgtcaaggtattgacgttgtcttcattgaagatccagggaatagtccagtgcaccatcccaatacagcggaattaacgttaatcaatcgtgagaaggaactaacgatttggggctgttcaattgggggcgggaccatcgaaatccgccaagtgaatttgaatggcattgtgattaaaacggatggcccgttaccattggtttttgtcgaatcggaacaagaaatcggcgatgctttagaccagatatttgaaggcaactatcgtgataagcgcatatcggttaaagtgccagatcggtttttgtataaaatcgaactgattgataagccgtacccggaacagattgaacaggtccgcggaatgagccaagacgttattgtgttatagaaagtggtgggaagatgtatacaacaattcacgaattagtcgagacagcgcaagaacggcaactaccaatctcggaattgattatcgaacaagaggttgcgatgagtcacactagtcgtgaagtcatttgggcaaccatggggaaaaacttggatgtcatgattgcggccgaagaaaaaggcgtgaccggtgaaggtgttcagtctgccactgggattacaggcggtgaagcggttctgttgaagcggtatcgggaaaagggaaagtcgttatcaggtgatgtgatgttgaccgctatgcaaaatgcggtagctaccaatgaagtcaatgcttcaatgggaatcatttgtgcgacgccaactgctggttcagcaggtactttacctggtgttttgtctgttattactgagcgcttggcgcttgatcgggatgcgcagattcggttcttgttttgtgcgtcagcctttgggatgattgttgccaataaggcgatgattgccggggcaactggaggctgccaagccgaagtggggagtgctgccgcgatgggcgccgccgctgcagttgaagctgctggtggcacaccacaacaatcgtcggaagcattcgcgatggcgatgtctaatctattgggattggtttgtgatcccgttgctggattagttgagataccatgtgttaaacgaaacgtgattggggccgtcgatgccttgaccagtgctgatatggcattggcagggctaatcagcaagattccagctgatgaagtgattggtgccatgaaacgaatcggtgaagatatgccatctacattacgtgaaactggtttaggtggattagctgctacaccaaccggggttgcattgaagatgcaaatctttggtaaggataagagccttaaataaaagcgacttttaggaggaacaattatgcaaaagaaactttcaaaatccgcatacggcggtgtttcaggtgagaaatatgtaccgtatgtcaaccaaggcgacaaaaaggtcggcaacttagcgattctaataatggggagcattttagccattatttttgctgcttcaacagcttattctgggatgaaggccggtttaaccgttgcagccgggattccaggttcaattattgggtctgggttagtcggtgcctttgccaaatcaaaagggattttaggcaagaatattatgcaagggatgtccagtggtggtgaatcaatcgccagtgggatgatttatgttttaccagctattattttaattggtggccacatcaacttcattcaaggggtcatcgttggggtgctcgcaattcttttttcaatggggacagcctcattagtgcacaactacttaatggttgaagaacatggtaagttggtttatccagaagccatggcgatttcagaaaccttagttgcgtcagatactggtggcgattcgcttaaatacatgggcgttggctttggtatcggtggggttattacgatgctaacttcatcagtgtttggtgtcgtcaacaacatgattagctacgttggttcatcattttataaatggaaattggacgttgaagtgaatccattacttgcaggaattggttttatcgttggattagaagtgtcattaacaatgtttgcgggtgcgattttatccaactttgcgattgcaccgttaatcggttatttcacagatatggcgggcaacagtgcgcatgtttggaataacacgagtttagccgtgaatcaaatggccgttaacgatttatcaagttcatacgttaaatacattggtgccggaatgatgctttgtggtggtttaatcggtgcgattaaattaatcccaactatcgtgacatcaatcaagaaaacactagctgctaaaaacgtagcaggcgaagaaaagaatacacttggtatgattgccattgttgttggtggtgttgggatcttcgttattggtattatcattgcgcaaaacttcttaatggggattgttggtgcattactagcagccatcttaagtttactctttgtcattgtttcagcccgggttgctgggacgattggttgttctaacttgcctgtatcagggatgacaattgcgtcattagtgattatgacggtagtcttcgtattatttggttggacggacaataaccatacgcaaatcttattgatgttcgggacattcgttgtgaccgccgttgctgttggtggtggctacatgcaatctcaaaaagtaacatatgtcattggtggttcaaaatctgaaatgatgaaatatttcatgattgccgggattgtcggcgtaatcgtaactgtcggcacaatcagcatcttatcaccacaattcgttacagatagtgcaacaccagcctttgggttaccacaagcgaacttaattgctacattaacatctgggattatgacgggtaaattaccatggatcatgattatcgttggggttatgatggcattagctttctactttttagatttaccaatcatgaccgttgcaattggtttttacttaccaatttcaaccacttcaatcatcttgatcggtgctttgattaaagtctttattgaaaaagcaacgcgtgatgaagcgattaagaataatcgggttcaaagtgggattagtttatcatccggtttaattgctggtggttcaattattggtttaatcgggattattctccacgtaaccggtgtgttaaaagatcgcgtaattactggttttgcgaataccaatgcaatggggattatcttattggttgtcatggttgtttcgattactgtgccacttatgatgattcataaaggaggggcaacagaagatgggacgacagaaagcggagattgatttagaacaactcatctatgaaaaaaatccgcaagttcagtttaagttacaagctggccaggtcaccattattcggccgcagaatcactggattcaacggacattacggcgtttgtatgtgaagattccgctagaaacacagctggaacttgatgattatggtagttttgtctttaggcatgtgaatggaaaacgcagtgtccaccagattggccaagcattggcagggcagtatgatgaagccggtgaatacctgtatgaacgattactcgtgtatttgaatcatctagaacacacagaacatttgatccggcgggtaaccgactaagttttattaatcaattagtgaatcacatttttaataaaaaggagtttttcaaatgacagacagaatcgaattatcagcatgtacttcaatgatggtagggaagaatgcgtcaattgatggctctacgatgatttcgcgaaatgaggatcgcttctatgcaatccatcctaaacggttcttcgtacaaccagcagttcatgatcgacatgagacatatgtttcaaaatataacggcttaaccatgccgttaccgacggacggttatcgttacacatcaacccccaacggcgatttaagtgatggtttaaatgaagaagacgggattaatgaaaaaaatgtcgccctctccgcaactgaaagtgtttatgccaacgaacgggtattagcttatgatccgttggtcaagcaaggtttagctgaagattcaatgtgtacgttggttctgccatacatcgattctgcacgtcaaggggttcaattgatgggggatttgattgctaaatacggttcagctgaaggtaatggcgttcaatacagtgatcaaaatgaagtttggtatcaagaaattgttactgggcatcactgggttgctgttcggattccggatgattgttatgcagttgccgctaaccaaattgccatcgaagatgtcgactttaatgatccagaaaattacatgtggtcagaaggtattcaagaattcgtcagtgaaaatcacttgaatccgagtgaagctgaatggaacttccgtaagatttttgggacggatactgaattagatcgtcactataacacaccacgggtttggtatgcacaacgctatttgaaccctgaaatcaaacaagaacctgaatcgagtgacttgcctttcattcgcaaggctaaccgtaaaataagtgtggaagatgttcaatatgtgttaaaatcacattataacgaaactatttacgatccacttggtaatgggacagaagaacaaaagacgatttatcggtcaatttcactttcacggacgcaaaactcacatatctgtcagattagaaacaatgtgccagatgctgtgcgtggtgttcaatggttaggtttgggggtaccaacattctgtccacacgtaccattctttacgaatgcgatggatacggatgaaagttatcgcgaactaccagcgaagatgcagttgaagaacgcttactggttatatgaagcattagcaatgattgttgaatcacactacggggcctttaagaaagctgatattgactaccaaaaagcattatcagaatgggcaagaactaagattgctacggtggatgctgctgtaaaggcggaagcgaatgccactgatttcttaacccagcaaaatcatgaaattgctgcacattaccatgaagcaacaaccgatttgttagcgcaattggtgacagaaggaacgcaactttctaagttgaccttcgtcatggataagaacctatagccaagtgcgcactttatcatttgtcacactcttccaaggggggagtgtggcttttttaatcgatggaggtgctacagtgattgctttaaaaggaaattcgaaaaaaattattatcgcgatggtatacggttttttggcggcggtgagtgttaatctgttcttgattccggcgaagacgtattcgagtggggtcacggggattgcccaattactaacctcgttagtcagctatatgggcggctcattaagtgttgcgatgttggtctttattttgaatgtgccattattgattctggcatggttcaagattaatcatcagtacgcgatttttagtatcgtcgctgtttttacgagtgtccttttcttgaaggtcattccagtacctgttcacccaattgtcaccgaacgatttgcaggtgccttgttcgggggtgcattgattggtttaggggttggcttgtgttttaaagcgggtttttcaactggtggcacggacgtcattgtgacgttagttgggcgcttaactggcaaacgggttggtgttgtgaataatatcatcaacggaatgatcattcttgcagcgggcatcttctttggttggggtgctgccttatacagtatcgtcgaaatctttgtttcaagcttgttgatggattatatctatattcaacaacaaaaggtgactgtgacgatttttaccaagcgacctgaagaattgaagaagcgaatgcatgactttattcatggtgcgactgaattagatggaactggtctgtataccaaccaagaaacaacagtgatcatgacagttgtttcaaaatacgatctaacggaattaaaacgggtcgttaaggatgccgatccgaatgcctttgttaatattcaatccacaatgaacttgtggggtaaatttgaaaacgtcgaataatagtagctatcctctggaactaaaaaacggtcctttcaacaacgctaagttgtgaaaggaccgttttttttatgtggtttggcggagttgaccgtcttcgatacgccaaacgtgatcgacgagatctaaaacccgttcgtcatgtgttaccatgacagctgcgcgtttttgttcatgaactgcatcgcgaattaagtggacaatttcacgaccacgttgcgcatctaaactggcggttggttcgtctgctaaaatgagtgcaggttgattgataagtgcccgagcaatggcaacccgctgcttttcaccaccagaaagcatagcgggataactatgtaatcgatggcctaatccaagttgtgtcagtaattgttcagcggcggattgatcgcgacgacgggcgattttttgtaaaaaagtcagctgctgagtgaccgttagatagggaattaattctgaactctgaaaaataaaaccaattgattcgcggcggatttgtgtttgacgattacgattgagtgttgcaagttcttgaccggccaaggtaacacgaccggctgtgggttgcaagagcgcgcccataatcgtcaacaaagtacttttaccaacaccgctgggaccaacgatggcgctaaattcacctggctgaatcgtgaaggagacatcttttaaaatgtgattaatttgatcaccatcgggataatctttggtgatgtgttcgagtgttaaaatcggtgctgacatattaatgacctccaatagctgtgatcgggtcaatccgaatcacctgaataagggataatagggcgcttaggatggcgacggctaaaaatagaacgctggtgccgatgatcgttggtgctgtgagcataaacggcatgctggcaggcattgactgggcgatgacactaatgataccgccagccaaaagaatcgccactgccgttaacaagccaatctcagagatgatgtgctggctgagatagcgtgtggttgtgcccaatgcttttaaggccccaaagtcccgtaatttctgtagggtaatgatataaaagaaaattgcgaggacaaacagtgagatgacgtataaaaagccgatcatcaagtacaatgaactttgttctgcagagtagccagggatgttatcaatcaaggtttgtttgctgatcacttggtagtgcttgttaaccgacaagggcggtttgctagcaaacgcgttataggtcgtcttttgcgttggaaaaatggtttgccactggtggtggtttaaataaataacaggcgtatgggcataagccatctgcttgctaaagccgccgattttaaattgctgaccagtggtactgtctttaaaggtgtcgcctaattggtaaccattggcttgtaacttgctgctgaccaccactttttgggtggcttggttggacagcttttgaccttgggtgactttgggtgtcatgaagctcgtagcgtcaactgcaatgtaggcaatatcagtttttgtttgttttttaggccgctcgatggtggcttgggtgacgttgatgggtgtcagtgattggtgtttgagagcttgccaatcagattgggtgagtgccgagcgactcaaccgactttccgaaccggcttgtaaaacaaaatgcgtcgccggcgtatttttaatagccgcgccactatcgtttgctaaaccggcagctagtccggtgatgaagagtactaggaaaacgattaaaaagatgataaaactcagtgcgccaaattttaacttattacggcgtaattcttggattgttagaaacatatgccgacctccgatgacttgttattaaggctactataacgatggttagttgattcaacaataatcaatctaagtgtttctgtgttataatgcacacaagttagtcaattgtgatgtaaatggaggctgaaagatggttaatctgcaagacagacgggttaaacggacacataagttaattcgcacaagttttattgagctcctgctaaaacacccaattaatgagattacaattcagatgattgccgaccgggctgatattaatcggcggacgttttatttgcattatacggatatctacgatcttttaagccagacagaagattttaccttaaatgagttcagccagttgctagaacgttttgagttgccttctgaaccacagattgttggccaaactttctttagatgggtcttgtcatatgtgcaagacaacgagtctatgttacgggtattgtgtcgtaatcccgattcacagttaatgaataaattagttgcgttgaccgtgactcacggcaagcgggtgattccatttcagcagccggaaaacgctgattatattttgaattattgttgttggggtctaatcggtgttttgcacactgcattgtttaaaccagcgtttgacgcccagcaattggcgctcgttgctgaacagttattgaatgcttctttacaagtcagcgaaattaaagcatagaaaaaagcccaccggtaaataaatgtcggtgggcttttttctattttattttgctttagcagcttttaattgcttgaggttaacaacgatcttgttgtttaattccgaaacgttggccttgtcggctgcatcgaaatccgtaatgctaattaaagcggagttttcatatactttttcaacagttcctgtaaatgcaccatctaggtcttcgttcactttgccggttactaaatcaccgatattgagattttctttatccatagccaaaaactccttcagacattattaaaattaccaaataaggtgataataaactatgtcatggtaaatagcaagacttactgctataaattaatcgtttgattgtgaatgaaacgaaattggctatttaattccccatctaaatacgctaaaacgaagaagtgttaccggttacaaatcaaaattgaggggaattcatatggaaccttacttagttttttcagatattgatggaacgttggtccttgaccatcaaatcgtgacacctttgaccaaacgcgtgattcgaacattacaaaaacgcgatgtgattttctatattgccaccggccgaatgtacaatcttggccgggtaatttcgcggcaaattaacgatgatgtccggattgtggcttctaacggtgctgtctttgaaaatggccatcagatgaacaagcattatttaggtaaaaaagcgctcaaagctgcttacgaagcatgtttagcagatcccaatttatctgcgcacttttttaccactgacacagcttactatacccaagaaatccccaagtttgttgcgcgcgatgcggggaatttattgttgaatgccgatattgataatcaaccggtgactgatttagaaatgttgttgaatttaagtgatcagattactaacgggattatcattggtcgcggtcatccagagagtttagcagccgctaaacaacgattaatggatcaagctgtgatgagcttgtcttcttctggtccagacaacatcgagatgattccaaccgggattgataaagccactgcaattcgccagattcaaatgattcatggcattgatgccgatcatacaattgtctttggggatgggcaaaatgatttgggaatgttgcaatcagcgaagtacagtgttgcgatggacaatgccttaccagaggtcaaagcggctgcaaattatgtaacagaaacgaatacgaatgacggggtcgctaaattcttacaacaacattttgaattagcactttctgatacagaagttggtctctaggggcttgacccgctttttatttttcgatatacttatatcacggttgttaatcaaccgtgaaatgctgttttagctcagtaggtagagcatcaccatggtaaggtgggggtcgtcggttcaaatccgataaacagcttaaaaaaagagtgtgactcgaactgggtaggctttgaggattaacagggaaaagggcattatggcgggacttgccataatgccctttttgcagttaaccggagaagactgttcgaggagcacgttaaaaaatgagtgcattcaagcttggtcaacttttgagcattaagtcgagaataaaaggcggacaacatttctaacatgttgtccgtcttttttaggcttttctggttaataaacgttcagttaattgttgtagcgttgtttttgcgggcatgtcgggtagtttcgcaagaccagcgagtgcgcggtttgtgtaatcttgtgcgagtgcttgggctttttcgacacttccagattgacggacgatgccttgaacagcgtgcacatcggcatcagtcatagctgcttgtttttccaagtagggtgctaatgtttggcgattggattgcagtgccatgattaacggaatcgagtagacgccgcgtcgcatgtcatcgagaactggtttgccaaaatcgacatcggtctgagtgtaatctaagatatcgtccagaatttggaaggcgagaccgatatttaagccgattttctcggcttggcgggcaaacttcaagcctttttggctttcgtaagcaccgatgaagcaactgagcgcgaacagttggccggttttaccgttaatttgttgtaggtactgttcgggggttaaatcgagattatatcgggttgtcatctgactgagttcaccgtcaagaatttgatccatcgtttggctgttaaattggatgctcttcaaatcgctcgcataattggctagtaacttgaagcagacaacgaataagtaatcgccagcgtaaacggcgacatctttgccgaaacgggcttgaatcgattcttgatggcgacgtaaattggaattatcaacgatgtcgtcatgaattaatgtcgcagtgtgtagcgtttcaacagcggcggctaatgcgatcatcttctgtcgatcgactgcattaaactgtgaaaataataagcagtaagcagggcggagcaacttgccgccagcactaatcatctttaaaatggcgtcggtgacggcttgatttttggtgtgaatgttgtcttcaatgagcgcaagactttgcgcaagttcggtttcgatttctggatagttctgccacatggcatgtactttcgccataattaactccttgttaaattaaatttcgtgttgggcttttaaaaaagtcagggttttgacatgttcgaataaaaaattcgcggctacgccgaccgcaattccggcgagaataccgagaaaagcaagcactggtagatagaggaggacttgccaactctgggcaatgaaactcgcgacgcagagttgaccgacattaaagagcagaccaccagcagctgagatgccaatcatactcataaagcggcggctaaattgcttgaggagtaccatgccaaagaaacttagcgttgccccagcaatgctatacataaaagtagagagggttccccctagcaaggcggataaaacagttcgcatcaccatcaataaaaagcagtcgctgaccggtagggtaaataacgaaatgatggtaattaaattggctagtcccaacttagcacccggggctacggcaaatggaaatggaatcgcgcgttcgacaaggccaataataatcccttgagcgcacaagagtgcaatatagatgtatttacgcgtttgatcgttagtcatcgctgtactccttttaaatcaggcagaaaccatcccgcccgtgtcggtcccatccttggctttaatttcaatcagtaacttgtgtggtaagcaaacaatggtttggcctggcttagaaattttgccacgcttaacatcaatctgattgaagcaattggcttcagtgacctcaatggcatgatcggttaccttaattttgttgtaatcaccgccggcatcgcgataagtgaagtggctaacaccatggtgggtggttaggttcactttgtagacggttttgccatcgtgtttgacgtaggccgtcaatacctgcgcgtttgaatccgctgcttgcgtcgtttgccattcgtgccaactaaaaacagcaactggggcaaacgatagaataaacaggccgatgactactattatatcaccagggcgaatcattttgatgtaacggttagcgcgaatttgtttaaacataggcgtcagtctttctctctaaaatagcaataaaaggggttatgacaaaagcctgtctgtcataaccccctccttttgatagctgtgaattgcttttataatgtgctttcaaaagcattctattgcgtttagcactattagccaaacaactagctacgctagttattcgtctaattttgctaatccgcatagaataaacgcttttgacgcactcagttttataacgtgctttgaagttaactttctgcgtttagcgctgtgaatcaaatcatcgactatgtcgctaattcgcttccctgtgctaatgcttaaagtcaaaccgtttcaaacgcactcattgatttttgtatagtgcacgttgttggccgtagcgccagtgaccgagatgtttttgtaaatatggaacaacccatttatctaatccgaaggcacggcctgaaccgttcatgcaggcgagggccattggaataatccaaatgttaacccaatagaacatccctgaaaggcagaatgtgataaccattgcaacggttactgcgctcgttaaccaagtgaagagaccagcaattaaagctaagccaattaaaatttcaatgatggtcattgttttttgcatgaagaaggcgacttcttggtttggaatcaagaccttcgtgatgctgtagaaccagtggggcatcttatcgaagacgggcattggatcatgaccgaataagtaagaaaggccgaatgtgactttagcagttgctggttcagcagccccgcctgcagcggcaccgctagcagcacttgttgcatccgccgctttagaagcaccgctggtgacagctggttgaagccagtcaaaaggtaaccggagcttattggtgaaccaagaaccttcaccttgaaccttgtcccagcaatcaacaagccacattgcgcctaagaaaattcgcgcaggaactgtccataaaacattaccataccgtgaaatatgaccgcgcatcaagttgcgatcgttcttcgttctgaagaactcattcattgaatagtggaataaatcgtagccagaataaatctgaacaaaatagagcatgttgactaaatgtttaactaatgtggcaaagaacccactgagatggaagaaattcatcaagttggcaaccgcatagcgagaaccaattgaaaccatgaagccggaatagctccctttgtatgggactgttgctttaccttcttcagttgcgatgatgttctttagggctgttgcagcagatgcttcggcgccttgaacaatttggggttgaccgcggccgtcatcagtttcatcgaagaaagccacatcgccgacaacgtaaatcttgtcatcgtcaacagattgcatgaattcgtttgtcacgattcggccggctttaccggttgttaggccaaattgtgccgcttgtgaggaagctttgacaccagctgtccagattagagtggcagttgggaaagttgaaccatcatttaaatcaacatgcatttcgtgaacacctgtaacaccggtattcttgcgaacatcaattttttgtttagccatgtagcgttctgctttggctgcatcgttgcggtcgagcatgttcatgatggttggtgccatttccatcattgtaaattggatttcttcgggatcaatcttgttatcagctgctagttcatcacgccagtcgcgtaattcgccgatagtttcagttccggtaaagccagaaccaacaaccacgatattcaaaagggcccggcgtttttctgggtcgtgttcaattgccccacgacgaacaacatcgataatatgttgcttcaattcaacagcctgttcccatgaacctaaagtgaaaccatgttcggcaaccccaggtgtgccaaagtcgttaggttcactcccaatccccaatataacttgatcataggcgtagcgtccatgttcagtaatgacggttttgtttgcttgatcgatgcgggttaccgtatcggtcaccaacttaacgtttttgcggcgacagaagagatgttgcaaatcgtgttgaacgtggtcttctggcacgcggttagcagctacttcgtgtaattccgttaaatacgtaaagtaggaatgtttgtcgattaatgtaatttgataatctggattcttcttgtaatatttcgcaagttttttagtcgcatagatcccggcaaaaccggcaccgatgatgacgatgtttttttgagccatgatgagccacccctaaatgaaataaatgcgttttcaatcagtatccattatacagaataaactaaagattgtctatttattcacggataagattaatgggattgatgactattaaggaaaccgttttaaattgtgtaaaaccaaagttaatcgccgtaaaataagtgatttaaaagacttgaactttttacataaaaaagataaactgactttgtgtgaaggttgatacaaattatatgattatttatgaaaagggcgggaaaattatgaaattaagtaaagcattagctagtttatcagttgttgcaatgtcagcaatggtattagcagcttgtggtaatagtaataacgctaaagattcatcttcaaaagaggcaaaatctagttcagtcaaagaatcatcaagcaaaaaagcaaccgctaagaaacaagttgccggcggtgaattaaaagacggcacttacaacttagaagaaaagaactacgaaaataattatcgccttaagatgtcaatgaccgttgccggcggcaaagtgacaaagacaacttacgattacgttgataaagatggcaagtcaaaacaagatgacaagacatacaacgaaaaaatgaagaaagtttcaaaaacaaatcctaaagaatatattcctaagttgaacaaagaatttacagataaaggtgcagatgtttcaagcatcgaagtcgtatcaggcgcaactcatagctcaaattcatttaagaattacgcacaacaattagtgcaagctgctcaagctggcaacactgaaacaatcgaaatcgacaatggtgctaagatgcaagatggcacatataagttagaagaaaagaattatagccatgattatcgaacagtcttcacaatggtggttaaagacggtaaaatcactgaatctaaattcgataacattaataaagatggcaagtcaaaagctgacgatgctgcatacaacaaacaaatgaagaagattgctaagactgatcctaaggaatacatcgctaagttgaattctgaattcgtcaaagcacaagaaccaggcaaagtagatgttgtttctggtgcaacagaatcatcacacagcttcgtcaactatgctgaacaattagtcaatgctgcacaaaaaggaaatacagcaacgattacagttgataacatcgtttacggtgaataaaacgggacttcggcagtcagctgccaatgaattaatgggtaactgtctgctagaaggtacgatgaagctaggacaagtcaatttgtcctagcttttttaatggaaggaagtccgagatgtcttttaaaacgtttttagaatttgtccggattgaggtcaagacggcgagtgtcttgcccttaatcttagggattgtttattgttggtacgttaatggccagctgaatccagtgacgacaattgtttattttgtcgcccagttttcgattgtattatttgtgactggctttaataatgtgatggattactacaaagcagttgatctggattatcgggcacagacgaatatcattgggcgcaaacatttgtcgccaaccaaggcactgcatttaatgctctattttttattgttcagcatggcggctggaatttggttggtttggcaaacgaacattttattactattaatcggtggcgcctgtatttttgtggccgtcttttacacgttcgggccagttccgctatcgcggatgccggttggtgaattattgagtggtgtgacagaatcatttggtgcattttttatcatggtctatgtcaacgtaccaagcgacagcatcatggcgctccattttgattggccgacgtttacccttaaaggtcaattaccaacattgcttagtttatgcctaatcggtgtgattattgcaatccccacttcgaacattatgttggcggataatatctgtgatctagatcaagatcggcgcaatgaacgttatacactgccgcattatttaggaacaacctgggcgttgcggttgtataatacgttgatttggttctcactagtggccgttgttgtggcagtgattacgaaggtcttaccgattgaatcgttactattgttattattgattcctgtcattttgcgcaataatcgccggtttaatacacggcaactgaaggatgtcacctttattaccgcgattcaaaatgcgatggcgatcaatattagcttgattgtcagcttgttattagcgattgtccgcacgacctggtggggataatccaccacattgacagtttggtcaacacatgataaaataaatgggataaacgtcaattagagaggggcttttcatatgggtgttaagaaagtcgccttagcctgtactgtctgtggctcacgtaactactatgttgctgagaacaagaatcggacagaacgtctagagttaaacaaattctgtaaacattgtgggcaatactcacaacacaaagaaacgcgctaattaggaggaaataagatgattaagttttttaagagtgttggtcaggaaatgaaaactgttagttggccagatgccaaacaaacacgtaaagatacatcaacagtcgtcatgacctccgttttattcgccattttctttggcgttgttgattttgcaatcttaaaagtactacaattatttatcttttagaactggcttaattaagtcggatttgctatactgatggcaagcaaaaaacttcgcgtggtcggagtttttttattttggtatttaaaaggagaattcacatggttgaatcaatcgaaaaaagttggtatgtcttacacacatattcaggttacgaaaataaagtgaaggcaaacttggaatcgcgtgcccaatcaatggggatggagaacaatgttttccgcgttgtggtgcctgaagaagaagaacatgaaatcaaaaacggtaaggaaaaagtcgacatgaagaagactttcccaggctatgttttggttgaaatggtgatgtcagacgaagcttggttcgttgtgcggaatacaccaggtgtgacaggcttcgttggttcacacggtgccggcagtaaaccagccccattattagacgatgaaatcacacaaattttgcgtcaacttggcatgagcacccgtcatttggatgttgagttcaaagtcggcgaatctgtgaagattatcgaaggggctttcgctggccttgttggtcaaattacagaagttgacgatgaaaagatgaaattaaaggttaacatcgacatgttcggtcgtgaaacagcaacagaattagactacgaccaagtagacgaactagtttagagtgcgacttcaggcgggatgactgaaggagcacgtttcgaaaaaagagtgcgtttgaaacggattgactctgagcattaacctaatttggcgaattggtgctacaagcgccgatttgacaaatgtagttaagcgcaagagtcagtttcaaaaagcacgtttcaacaattaaagtagggggctaggatttgtcccaagccccaacaagataggcggctgagacgaaagatgatttgtctcagccgctttttttgaacaatcaatagtgtctatttcgaaagaatgatgtgatgacgatgtggtatatcattgatcaaatattaactgcagtgggcttagtcatttttttgttagtcttactggcaggactggatttttacaaactaatccgggtttcggcacattggcggccgtgcgcacgtttatatacaaaacaaccaacgctattcattcatggctatcgggggaatcgctattcattcggtcacttactcggacgcctacaaaaagccggaattgctaagaagagcatggtcatttgggtgggcagaaacggtcgattgcatgtggatggagacgcggcgttgcaggctaataacccaacgattcaagtcttatttgctaataaccgcgccgatgtgcaagatcaagtccgttggttagctgcgattattgaacacttaaaagaagcgtatggcgttacgcaagttaatttagtagggcattcgatgggcgcaattacggtgttgcgttatttgttgacatcagaccatgccgtggtggacaaagtgatattgttggcagcgccagttaatgatccatcaattggtccggatacaccacttgttttttggagcgagttaaccagtcgtggaccagttaaacgaacacgtaattataattatttagccgtgcgggccaagtattttccaactgcgatcagtgtcttaaacattgctggcgagttactaggaactaatcgacacgatggttcggtagcagtcgatagtagttttgcattgcgtagcctattaaaaggacacgtgcgccattaccaggagatgttagttcgtggaccgggtggagcacatagcatgttgcacgaaaatcgtttagttgatcaagccattgatgatttcttgtggcgcgattaatggaatcgccttgctttttcggcaattgcttggtatattattaaggtatgttttcatacactagtgggagaccaaatataatggccatcttaaccacatcacggacttaaggaggtatgtttcgtggctaaaaaagtagcaaacatcgttaaacttcaaattcctgcaggtaaagcaactccagcaccaccagtaggtccagctttaggtcaagctggtatcaacattatgggctttacaaaggactttaacgctcgtacagctgaccaagctggtttattaattccagttgtgatcactgtttatgaagatcgttcattcgactttgtaacaaagacaccaccagcagcagttctcttgaagaaagctgccggtgttcaaaaaggttctggcgaaccaaacactaagaaggttgcaactgtaactaaagctcaagtgcaagaaatcgctgaaactaaaatgcaagacctaaacgctgcagacgttgaagctgctatgcgcatggttgaaggtactgcaagaagcatgggattcactgtcgaaggttaattcatgcttgacactttcagtcggattttcaatgaaagttgaaaaatcaagtgggaggtcaaaaaccgttcaccacaattgcaaggaggaaaaccctaatggctaaaaaaggtaaaaattatttagaagctgcaaagcaagtggatgctactaaagcatacactgttgaagaagcaatcgacttagtaaagaaagttgattttgcaaaattcgatgcatctcttgaagttgcatatcgtttaaacgttgatcctaaacaagctgatcaacaaattcgtggtgctgtcgtactaccaaatggtacaggtaagacacaacgcgttattgttttcgctcaaggcgaacaagcaaaacaagctgaagctgctggtgctgacgtagtcggtgcagaagatttagttgaaaagatccaaggcggctggttagactttgacgttgccgttgctacaccaccaatgatggctcaagtaggtcgtttaggccgtgtcttgggacctaaaggcttaatgcctaaccctaagactggtacagttacaatggacgttactaaagcagttaacgacattaaagctggtcaagtggcataccgtgttgataaagctggtatcgttcacgcaccaatcggtaaggtatcattcgatgctgctaaattagtagaaaactttaaagcgatgcaagacgtgatcatcaaagctcgtcctgcttcagctaaaggtcaatacattacaagtttatcagttagctcaacatttggccctggtgtcaaagttgacgttgctagcttctaagttggtaatgcaaaaagcgctcatccgaaaggatgagcgctttttttgttgctataattaagcattaatgtcgataatttcgaattttgtgacatccactaaacctttatctgtaatccgcaagttcgggatgacgtcgagtggcattgcgccgagcttcataatcggatcgaagtgagcggtgacgtggagtttatcgtgacaaatagcattgaaggccttttgatgttcaattaaagtgtcgatgggttcgttactcattaagccgccgatgacaaatggtaatgttgcgatgacttggccatcccgaatggcaacgccaccgccttggctttctttgagcgcttcgatggcaacgaccatgtcagcatcgttggtaccgactactacgaggttgtggctatcgtggccgatgctggtggcaatcgcaccgttcttgatgccaaagccgttaagcaggccaaccccgacattaccagtgagatgatgtcgttcaactacggccactttagcgatgtcttcgtcaggatgatattggaaatcaccgtctgcagtgtgagcgaccggtaagacgagattttgtgtccgactgatgctttgtaagccgatcacgtgggctttatcgcttgtgaggttgagttttaattggtcagcggtgaatgtatcgaggtgtacggtttgtaacaagtcatcaaaaccagtaactgaatcttcagttgttagtaagtattcgccgctagcagcaactttttgaccatcgatgaaggtttgattcacactgaattgttcgagatcatcaaccaataggaaatcggccttcaaaccaggtgcaatcccgccgcggtcagctaagccggtacattgggcagtgttgatggtggccatttggattgccatgatggggtcgatcccgtttgcgatagcaacgcggatactttcatccaagtggccggtttcacggagggttacggattgtaagtcgtcaccgcagagacaacagaaacgtgcgttttgcggcgtcacgcctttcaaaagggttggcatattcttagagacggtgccgtagcggagataaacatacataccgcgactgatgcgatcgagcatttcatcgacttgggtacattcgtgatcgttacgaataccagcagcggcatatgcgtttaagccttgttcttttaaagcgggtgagtgaccgtcgatgagtttatttgcgttgagtgaaacgagtaattcgtctaaaacgccatcatcagcattgacaacaccgggataattcatgaattcggcaaggccgtaagtgagattgcggtcgtaagaatcttggatttcagcagcggtaatcacagcaccagatgtttcgaggcttggattagcagcaggcacacacgagggcatggtgtacttgatatcaagtgctgtctttttggcagatgcgaccatgtattcaagcccccgcatgccagcgacgttcacgatttcgtgtgggtcggccaagatcgtcgttgtgccatgtggtgttacaagtgatccgaagacagcgggtgagacattggcagattcgatatgaatatgcggatcaatcaaacctggcataacatattggccgcgtgcatcgataacttttggtgcaaggtagtcgtcgctgataccgaggaagcgaccattaccaatcgcgagtgtgccttcgataatacgaccattgtagacatcgacgatttttgcatttttaatgaccatgtcggcagcttgacggccagcagcttgatcaattagttgttttaaagttgttttatccatgagtaatctcctttatttagcaggtaattcgtgcattgtgaagagtaataataggaataagagcgcagcaacatacataatcggatgcacttttttacctttaccagcagcaatcatggtgatggggtaagtgatcagcccgaatgctaaaccgtatgagatattataggttaatgggacgcacagaataatcatgaaggctgcaaaagaagtttcgaattctgaccagtcgatgttggcaattgacttcatcatgaatgaacccacgatgattaagattggggcagtcacttgcgacgtcacaacggccagtaaaggtgagaagaataagcttaagacgaacatgatggcgacgaccacggcggtgaaaccagtccgaccaccagcagcaatcccagttgatgattcgatgtaacaagcagttggggttgaaccgaaaacggaaccggcaatcattgaggttgaatcggcgaaaagggctttgccgacttccttaggcatcttgttgcccttgatgaaaccagcttgttgagcaagtccgattaccgttccagttgtatcgaagaagacgctgaagaaaaagacgagaattacgacggccatttgaacattgaagacgttgtggatgttcatgattgagacaccgaaagtgggtgctaagcttggaattgaagcgatgatgctgtgaggcattgcgattagaccagtcacgactcccatgatggctgtggccgccaaaccgatgaataaagcgccagggactttgcgggctaatagagcaacggtgacgattaaaccgaagacggtcaaccaaacgtgcggatctgaccaactcgtaatggtgacgaatgatttagcactactgacgacgatgcccccttgttttaatccggtaaaggcgatgaataacccaatcccgacggccatggcggcttttaaattagcgggaatcgcgttaatcacgacttcgcggacttttaagaccgtgacaagcatgaaaaggagggaagcgacgaaaacaccggcaagtgctgtttgccaaggaattcccatgcctaaaacgacggaataggcgaagaaagcattgctgccgagtccgggtgcaacggcgattgggtagttggcgatgaaggccatggctaaacagccgaccactccagttaatgcggtggcgacaaagacggcccccttatctaggccggcgtcgcctaatatagttgggttgacgaataaaatgtatgacatcgcaataaaagtggtaattccggcgatgatttcggttttaatggtcgacccacttgccttaattttgaattgacgttcgaaccagttcgttcgtgattctgttgcaatatcaatatttttatccattatgcacctctgaattagtattttaagaaccttggcattattgtacaacaaaacaatcgtgtttttaagaaaaatgtgaaaaatatttattattttgtaaatatcgttcgtgatttggtgatgaaaagggtttattttatcaaaaaagagccattagcgtgaaaaacgctaatgactctctcataattcgcgattaatttagatggttgttaggacgtgattagcaatcgctaattcttcgttggttgggatcatcaagactttgatggctgaatcgggggtactgatttgacgggcacctgagccgttttcgttcaattcaggattgatttgaacacctaaaacagccagcttggcacagatatcagcacgtaaacgggcgtcgttttcaccgatgccggctgtgaaagtgatgacgttcgcaccaccgagttcaacgtggtagctcgcgatgaacttcacagcagaagtgatgaacatgtcgtaggcgagtttagcccgtggattggtagcgcgtgttgattgaatatcgcgcatgtcagcggaaacgcctgaaacgccgagaatccctgatttggcgttcaaaagcgtgatgacgtcatcggcactcttatccaattcgttcattaagaatgggacgatggccgcatctaatgaaccagcacgagtgcccattggaacgccttctaacggtgtgaagcccattgatgtatcgacaggcttaccattttggctggccgtaattgaagaaccgccacccaaatgaagtgtaattaattttaaatcggcaacgggttctttcaaaaagtcagctgttgcttgtaagatatagctgtgactaatgccgtgttcgccatacttgcggatttgatagtcttggctgtattcataaggtaagccataaaaactagtttcatctggcatatcgagatagaattgactatcaaagacagccacttgagggacattagttggtaaaatatgcatcaaggtttcaatgcagtcaacttgcacgggattgtgtaaaggtgcatacttgtcgagttgttttaatgtatctaagttggtgcgatcaataatggttggtttttcgaacgtggtagcaccggcaacgacccggtggccgactgcaatgatgtctgcgggtgaatgaatgatgccattgtcttcaagttgtttcaaaagtcgaagaacaccatcttcataggaaagattagcaatggcgacttgttctttttgaccttggaacttgaaggtgaagctagcttctggtgtgttcatgcgttccatgagcccgcttgccagtaaggttaaatcagattgttggaatagttgccatttcaatgatgaactacccgcgttaacgactaaaatattattcaaaaaactgcacctcttacgattaattttcttgatagtctcaattttaaaccgttttttcagaaaaataaaataagtaaaacgtaatgctaggataactaaaattaagtgccgataatgattgacgctttatggaatccatgctatatttgtagttggttatttatgctaccgaagactcaggtgccaataggcttaatatcctgccgaggaagatacgttgaaatccctctctatgtcttggtggacatggagttttttatttttataaggaactcttgaccacaagttttacaaatctaatggaggtgaatcaattgagcgaaacaatcattgcaaaaaaagcacaaattgttgacacagttgttgaaaaattcaatagtgctgtttctatcgtcgttatggattaccgtggcttaacagtagaacaagtaactgaattacgtaaacaattacgtgaagctggcgtacaaatggaagttgttaaaaacacttacttgcgtcgtgcagcagacaaagctggttacgaaggtttggatgatacattcacaggccctacagcagttgcattttctaacgaagatgttgttgcaccagctaagatcatcgctaactttgctaagagtgctgatgcacttgaaatcaaaggtggtatgattgaaggtaaagtggcaacacttgatgaaatcaatgccttggctacattgccaagtcgcgacggtttattatcaatgttactttctgtattacaagcaccagtccgcaatgtcgcatatgctgttaaagcagttgccgacagcaaagacgaaccagctgcataatttaaaattgtgtagttaaaagtgttatcaaaaaatattacccacaaaatggaggaaacaaaaatggcattagacgtaaatgcaattgttgatcaattaaaagaatcatcaatcttagaattaaacgacttagttaaagcaatcgaagaagaattcggtgtttctgcagcagctccagtagcagcagcaggtgcagctggcgcagacgcagcagctgaaaaagacagctttactgttgaattatcagaaatcggccaagaaaaggttaaagttatcaaagccgttcgtgaaatcacaggcttaggcttgaaagatgctaagggcttagttgataacgctccttcagctcttaaagaagacgttgctaaagacgaagcagaagaaatgaaagctaaattagaagaagttggcgctgtcgttaacttgaaataatttaaatagagcgcccttggcgcttgtttagattttgagcactaacctaaaatcgggcatcgcggcgatctaagccatgatgcccgatttgtagttaagcgcagaaatctagcgccaatggcacgtttcaaaataaagtgcgtcattaacgggttgtttttgagcatttgcctaatcagccggtgatttgactgatgtagcaaagcgcagaaagcagttaatgaaagcacgttttatttctaaaagaaccccactaatgtggggttctttttttacatatttttttgtaaaacataaatggcgagttgcacaaaataacacgatgctaaatatggattccatatcttaagcgacagccattgctgttgagaactaaaaaggcaatcagaggatattgattgtcgggtgaacgggaatcggattgtgctccgggtaagtaataagcgaaaatcataatctaacagccatctaacataattgtcattttactgtgttttgccttgggatagcttataattaaattaattaagttaaggagcggttgatatgcgaaaatggggcaaacacatatatgaaggaattcagcgacacctaacgttgttaaaaggcatcttcatcctttcggtgatggtctttgttatcctagaagtcggccggattttccgggacttgaacggggaacaattgaaagcgagtttaacgacacaaagtccgtggaccttgctagcgatgctggtgattgggtttgtggcggtcttgccaatgctcaattatgatttcgtgattgcggagttgctgccggaggactattcattctggtataaagtcaaatctggttggatcgtcaatacgtttacgaacattgccggattcgggggcttcttaggtgcgagtttacgggccaatttctatggtaaaaaagcgtcacaaaaagaaatcttaattgcgatttcaaaaattgcgctgttcttattagccggcctgtcaatctggtgtctgattagtgtcgttttgatctttggctttggtattggtgggatgtatgccaactactggttatggctagtgggcggttcgttgtatttccctggtctgatgattagtacgcgctttaaaaatgcggcctttttcaaagatctttcgatgcaacgcgttttacgcctaacattagggtctttcttagaatggggttttgcgggcggctttttcttaacgattggttatttcttagagattaagggtgacttattacaagtcttaccacttttcatgattgccaacatcattggtgttatttcgatggtaccagggggcttaggaacgtttgatttgttcatgatctttggtctgagtgcagtcggcgttcaaaatgcggacgccgttgtctggttgtcattttaccgagtcttttattacatcgtgccgtttttagtcggcgttggtttatttactcacgatgcaggcagccggttaaatcattatttacagggcttacctcggcaggtgatgcaaaaaatcgctcatcacttcattgttttcttcctttatatttcaagcatcattctattattagtagcaactgtcccgaactttgcgattaccaacacagtgattggacagctctacccatacacgttcttcttcttagatcgtgtgacaaacatcattgtagcgtttgtcatgttggccttagcccgcggcgttgccaaccgcgttcaaaaagttttctggccgttgatggtgctattggtgattgcgattaccaatacactatggcgggatttctcaatcaaactcgctgtctttttaacttttgtgctcgtagctagtttcttattgaaacgcgaattataccgtgaacggatcgaattttcatggaatgatcggattgtggatggtgtacttttcgtgggcgccttcttgttatacggctttgttgggattgccaattcgccacacttacggcatcgcaaacccgtaccaacagcgcttttatttccatccgaaagagtctggttggctggttttatcgggatgttggttgccgcagggaccttatatctcgtctaccgttatctcagtcgagggggccgttcaatagcagcgccatatgatgaagcacgaattgctaacgtgattaacacttacggcggcaatgaggtcagtcatttggcatacttacgggataaatcagtttatttctatcaggaagaaggagaagatcaggtattcttgctttatcgtaaaaaagcggatcgcttaattgtaatgggtgaaccagtcggaaatccggctaaaattttaccggcaattgaacagatgatgcacgacgctgatttgattgattgtcatttagcgttctacgaaatttcaagtgaattaacgatgcaactgcatgaaatcgggtttgactttatcaagtttggtgaagaaggctacgtccgtttggcggacttcacgatgactggtaagaaacggcgggctgaacgcgccttaatgaataagtttgaacgtgaaggctatcaatttgaaattttaaacccaccatttagtgccgaattaatggcagaactcaaagcggtttctgatgattggttgggtagtcgcgttgaaaaaggcttctcgttaggctttttcgatgaagcatacctccaaaaagccccaattgcagttgtctataatgccgatcaccaattaattgctttcgctaacgaaatgccaacaggaaccaaagaagtcgcaagtattgatctaatgcgtcacagacaagacgcgccatctggtataatggatgagatctttattaatctctttgaacaaaatcgaacggatggctacacgtacttcaacctcggcatggcgcctcttgcaaatgtagggacttccgagtttagctttattgaagaacgaatcgctcatctgatctatgaatacggctatcacttctacggattccagggattacggacctataagaagaaatatacgacggaatggcgttcgaaatatatcgcttatcaaaaacggacctcattaattttcacgatggttcaagttttaatggtcgttaatcaacgggttgcggatcaaccgcatcctggtggcttgctaggtcgtttgatgaagtcagttcaaattgggaaattttcagataactaacgacaaatgaggaaaaaagatgacagagtattactattctaaaaatccagacgttgaacacgctgagcggcaatggacgtttgaattacgcggctttaattttaaatttataacggataacggggtattctctaaaagcactgttgattacggttcacgggcattgctagcagcggtcgatctgagtgaagcgccagctggtccagtgcttgatatggggtgtggatacgggccaatcgggatgacgattgctaagctcgcaccagagcgccgaatcgacatggtcgatgtgaatgaacgggcattggatttggcacgtaagaacagtgaattgaatcagattaccaacgttactgtattcgaatcagctgaatatcaaaacgtaacggatcaatacgccgccatcttcaccaacccaccaatcagagcgggaaaagatgtggtgcaaaatattttgactggtgcctatgatcacttattaccagatggtgaattgaacgttgtgatccaaaagaaacaaggtgccccatcagcgaagaaaacgatgatgagcatttttggcaacgtgcaaattattcacaaggataaggggtattacattctccaaagtattaaattaaagtaaggaccggggttgaaagcggtaaattcaggcgaattgtgctaaactatgattaaagtacaaggaggttgatacgatgaaaaccagatataaaattttaatcggcgtaggggtgactgcagcagttggcgcaacgaccgcttttgtcggttctaaggcagtaatcgataaagtatcgcgctatcgcaaacgattagcagttaaaagttttgtaaaagacaaattacatggtaatcaaaaggcgttagagttggtcgatcaactctccgatgcggatgtgaataacttgttgactgcggcagacaggttaacccaattaaaagataagctcggagaacacgcagacaatctaccagatatgatggatgatttgcgccaaacactaatggcttacgcaacaaaggtgaaagaaaaactatagagtgcgactcgagttggtcaggctttgagcattaacagtgaaatgagcattatggcagtccttgccataatgctcattttgcagttaaacggaagaggatggcttatggagcaattaaaaatggtatcgacaatccgtcggcaccatttttaattgctcgactagcgcgactgtgttttaatagttgagaagtaaaataaaggggcgactaacgcgtgagtgaaacacaacaagagatcgatcaatggatgcaagccgccatcgatgaagctaaccaagcacgcatcattggcgaggtaccgattggcgccgtgattgttaaagacggacaaattattggacgggggcataacattcgcgaacacgcgcaagatgcgacgttacatgctgaaattctcgcgattcaagaagcctgtatggttgaaaagagttggcgtctggaagataccgcgatttatgtcacgttagaaccatgcccaatgtgtgcaggcgcgattatcaatagccggattcccaaagtttattttggcgcgagtgatcctaaggctggtgtgaccggcacgttgatgaatttattaactgacaaacggttcaatcaccaagctgaagtggttggcggggtgcgagaagctgaatgtgcgagtttattgcagactttttttagaaagattcgcgaaaatcgccgtaaaaaaaagaaaatggctggtaattaatgcttgaatcaggtagaataggaattgccgaaaggccttgagacaatgatgagcctacgaatcgtgtcaggttcggaagaaagcagcactaagtttgttttatcatgtgtcttaagttttgtgaaaattaaccagacccaacggacaattaattttgtcggttgggtcttttttcatgcaacgcaatcaaaattgacggtaaaatatgctaaaatggaacaagtagttttaaatgaatcggactttaaattgcaaaggtggaggtcattaaatgagctatcaagctttataccgggtttggcgcccgcagcgtttcgatgacgtgattgggcaagaaacaatgacccaaacattgaaaaatgccattatgacgcaccaaacaagtcatgcttatttatttacaggcccacgtggaacagggaaaacatcggctgccaagatttttgccaaggcaattaactgtcattatcaaaaagatggcgaaccatgtaatgaatgtgagacatgtcgggccattacggctggcgccctcaatgatgtgattgaaattgatgcggcgtctaataatggggtcgaagagattcgtgatattcgggataaggccaaatatgcgccgacccaagctgattataaaatttacatcattgatgaagtccacatgttatccactggtgcgttcaatgcactgttgaagacgttggaagaaccaccaacaaatgtggtattcatcctcgcaacaacggaagttcacaaggtgccagcaaccatcatttcgcggacgcaacgctttaattttaagcggatcacggccgctgatttatttaagcgaatggcttatattttagatcaaaaggaaatgacctatgatccagcagctctgaaagtgattgccaaagctgctgaaggtgggatgcgggatgctttaagtattctcgatcaagtgttatcctttagcgacaatcacgtcacgttggataatgcgttggatgtgacaggcagcttaaccgaagcgttgttggcggattatgtccaaacaattcaggataatgcgcctaaacaagcgttgcaattgttgcaacagattttggctgaaggtaaagatgcccaacgttttgtggaagacttaattgaatatgtgcgcgacttactgttgtatcaacaagcacccgaattagtcgccgcaagtgaaatggatctattggatgaacacttcaaagcgctcagtgcagcgatgccggctgaccgtttgtacggggtgattgatatcctgaatgaaacgcaacagcaattgcgtttcacgaaccatccagaaatctatctggaagtcgcaacggtccgcttgacgcaagtccagacagcccaagtaacgactacgatggttgccgcaccagctgctgataatgaacaagtcgcagcgttgagtcaacaagttgcacaattacaagcggcgttacaaaaattggaagcggcgggaccagtgagtgctccagctgccaagcctgctaagaagattagtaaaaaggtcaaccgtaaggcgatttatccggtattggcagatgcgacgcggaccaatttggagaatctcaaagaagtctggccggatctgttgaatatgttggacgttaccaagcgcgccgtgatgaaggtttccgaaccggttgcagcgagtcaaagtggcgttgtcgtcgcgtttaactacgcgattttattcgagcgagctagcaatgatcaagatcttttgaacattttagaaaacggcttgaatcgtttgactggcaaccccttcaaggtggttttagtgccccacgatgtttggccagaaattcgccaggaatatttacagaatcacgcagtaccaagtcaacaggtaacaactgatgacgaagcagaagcaacgccgaaaccagaacaaaaaccggccgttgtcgaacaagcacaagctttgtttggcgatgcggtggttgttaaaaaagattaacgtttaaatttgaaaggaagtaatgaagatgcgcggaatgggtaatatgcaaggtatgatgaaacaaatgcaaaagatgcaaaaagaaatggggcaaacacaagaagccctcaacaatacagaatttgtcggcaaagcagccaacgatttagtcgtggtcacaatgactggcgacaagaagatgaaagacattgccattaaaccagaggccatcgatccagatgatgttgatatgttacaagacctcattatcatggcaactaacgaagcgatgactgaaatcgataaacaaacacaagcccaaatgggtaaatttactaaaggcctcccattttaagtgagacattaaggaagtgcattgatgcaatatccagaaccaattgcgaagctgatcgaaagctacatgaagttacctgggattgggaacaagaccgcaacccgattagctttttacacgattgatatgaatgaagacgatgtgacgaatttcgccaagaacttaatttcggcacgtcgtgatctgcattattgtagtgtctgtggcaacattacggatgaagacccgtgcgaaatttgtcgcgatacaacgcggagtcaagacatgatcttagtggttgaacaaccgaaagatgtcatgtcgatggaacggatgaatgattatcatgggctctaccatgtcttgcatggggtgttatcaccgattgaaggcaaggggcccgatgatattaacatcgccaatttgattaaacgattgcaaaaaacaccggctaaagaagttatcattgctactaatgcaacacctgaaggggaagcaacggcaatgtatatttcgcggttgattaaaccagctgggattaaagtgacgcgtttggcgcacggtttatcagtcggtagcgatattgaatacgcagatgaaatgacgttgttaaaagcggttgaagggcgtcaagaaatttaagaatggtgggtttgcgatgtttggtagaaaaaaaccgacattaaaacaattaggtgatcaagccttattggatttagtgtaccaagtcaaagataagtggcagatggcccaaaagacgcaagacaacgtccgcggactcgatgaccaattagagatggaaagtaagattcaacaagcaaagtttgaattcttattccgccaagcccgccaacgtaaagtagcaggtgaagcagtttcgaaagaagcagcaactagaaatacatttagatagcgcgggcattcagatgacagccgcagcgtgaagacaaggtcgagtgactttgtctttttttatttcaaacgtctgctgtcgcacgctaaacgcaagaacataaccgccggatacgcactcttccctttacgtcttttgttgaatcaagtaaaatggaagtaactctatggatgaagaaggttgttttgtggtaggaaaattaattacgtttgaagggccggatggtgctggtaagacaagtgcgttgatggctgttgtaccgctacttgaagccaagtgcaaccaagacatcattgttacgcgcgaaccaggtggcaatccgattgccgaaaagattcgcaatgtcattttagatgttgaaaatacggcaatggatgaccgcaccgaagcactgttatacgctgccgctcggcgacaacacattgttgaaaagattgaaccagcgttggctgataacaaaatcgtgatttgtgatcgatttgtggatagttcaatcgcttatcaaggggcaggtcgtggcatcggtgaggaagccgttgcgcaaatgaacttatttgccactaatggattagcgcccgatttaacggtataccttgatgtaccatctgaagtcggtttacaacggattaaacagaatcgacaggatcaatatgatcgattggaccaagagaagttggcttttcaccaaaaagttcggcaatcctacttacaacttgcgcaagataatccagagcggattcaaacgattgatgcgaccgcagacttagacatagttgttgccaaatgtctgcaagtgattgaacaacgatatccagacttattcacagcatagaaaaggggagattgaaatgaaattacttttagcaattgttcaagataaagatagcaacttattaagcagcgaattaatcgatgccaacattcgggcaaccaagttgtcaacgactggtggcttcttaaaatctgggaatacaacgtttatcgtcggaattgaagacgaacgggttcctgaagcgcttaagattattgaaaaaacgtgtcaggcacgcgaacaattcatgacaccgcctgttaatatggatgccacgatggatagctcaatgtcatatccgattgaagtgcaagtcggtggggcaaccgtctttgtgatgccgattgaacagttccaccgcttctaatcgatggccagtttaacaattgaacagattcaacccaaacttgtggcccagtttgcccagattatcgcgcgtggacagatggcgcatggttatctattagctggtgcacagggattggggaagacacaattggcacagtggttggcactgcgtctgttctgtcaacaagtgacaccagatgggcaaccttgtcgggcatgcccggaatgtcagcggattttgacgcataatcatccggatgtcattgaaattaagccggaaggtaagagtattaagattgccgatattcgctatttgaaacaagaagtggctaagagcgggatggaatccagtcaacgcttattcattattgaagctgctgaaacgttaaccgccagcgcggctaatagtttgttgaagttcttggaagaaccggcgcaaaatgtttacgcgattttatgtacgagtaataaaaatcaaatgctccccacgattttatcacggcttcaagtgattgatctggcagcattggcaccacaaatggtgcaacaacagtttgaagcagctggtattttgccacaacaagcgcagttattggtgcatttgacgagtgacttaactgaagcacagaccttattggcggatgattggctattacaagtcagtgcgaagcttgccgcgtgggcacaaaaagttgaacaacgtgatttagaagcatttgtgcagattcagacgcaaattttaccattattagttgatcgccaacagcagaagacctttttaactttggtgggcttatggtatcaagatttattgaattaccgctatgaattaggcgccacaccttgttttggtgcgtacgaaagccagttaaaccaggccagcgccgcgttgactaccacgcagttggtcgctcagacggaatatgctttacaagcacaacgcatttttgaacaaaatattagttgccaaaacgtcttagagagtttaacgttaaagttaattgcatagtaaaacgcataaccagcgtatcgggaggatatcaacggtgagtaaagacttatatgaacagttatcagacattgaacagcaagctaaattgacgtttgaggggctcagtgaaatgaaagcagtccttgccgaagtccttgagaaaaacgctgaattaaagattgaaaacaagcacttgcgggaacatttgcaagaattggaaccatcagccaccccgcaaacgggtaaggaaggggctcaagccctttcgaaatcaaaacaaaacttacagaatctttacgaagaaggcttccatatctgcccgtatttttatgggtcacgacgcgaaaataacgagccttgcgcattttgtaatgatgtcatctacggcgaacgaacaaacgattaaaaaaggcagggcaaaagggatgcttacttttggcctgtctttatgtcattattgatgcatcatgaaaggatagaacatgcaaacacaatcaagttttaaaacgacggaaacgggaactttatttttagtaccaacccccatcgggaacttaggcgatatgacttaccgggcaatcgatacattgaaatcggtcgcactgattgctgctgaagatacacgaaatacgcagaagttattgaaccactttgagattgaaacgaaacaaattagtttccacgaacacaatacgcaacaacggattgaaacgctgattgaaaaattagaagccggtgacgatattgcgcaagttagtgatgcggggatgccatcgattagtgatcccggtcatgagctcgttaaagcttgtattgaagcgggcatttcagtggtgccattacctggagccaatgccgggattacagcgttgattgcttcgggcatcacaccacaaccgtttacgttctacggttttttgcctcgtaaaggcaaggagttaacggaagccgtaacgacgttggcacaaaagcctgaagcacttatcttctatgaagcaccgcatcgtttgaaaaagacgttgcaagctttgctcagtacgtttggcgccgaccgcaaagtcaccttggggcgcgaactcacgaagaagttcgaagaattcattcgtggcgacctagaagaagtgcttgcttgggcgactgaaacagaattacgtggtgaatttgtgatgatagttgctggaaatccagcaccagatgcaacggtcagtgcagttgcaacggaatcgctatcccttcctgaacaagtggaagcccagattcaacaaggagcaagccccaacgtggcgattaagacggtcgctaaggcaaatggcttgaaaaagcaagtcgtttataatgcctaccacgaattaacagaatagaggtcacgccatgccaggaaagcaatattcagaaaactatcaaattccgtatttcgaaacggatatcaagagcgaattaacgcttgcatccttggtgaacattttaattttagcatcagagcatcaactcaatgcgctcaacgtcggtgaagcgacaatgcatgcgctcaatcttggttgggtggtcacgcagtatcaaatgaagattacgcggatgccgaaggtggatgaaaaagttaaaattgtgactgaagctgagagttacaacaagtatttctgttaccggaatttctggttatatgatgaagccggcaacgaatgcgtcttcgtccaaagcatcttcgtgatgatgtcgtatgaaacacggagtatggtgcaagttgtgccggaaatcatggcaccattcgagtcaagtgagattaaaggtagcaaacgattcccacggattaagaagattgatcccgaacaagtgacgaccaaagaatatcgtgtgcgttatttcgatattgatggtaatcaacacgttaataacgtccattattttgaatggatgttggatgcgctcgattatgacttcttgacgacacaccgcgtagcaattgtcaacatccgctacggccacgaaattcaatacggtcaaatgacccaaagcatggtcgaacaactcacagttgatgatataatcacaacacggcataaagtcgccgtggatgacctaagtgcagcagaagcggaaattacgtggaaagagcgctgagtcgaacgggttggctttgaggattaacgggataattgggattatggcgggtcttagccataatcccaattattcagttaaccggaaaaggcagttcgaggaagcacgtttaaacgaaagaaagccccattcacagataaagttgtgatgggctttcttttgttatcttcgaatatttattgaaacgtgctttttgaaacagccccctgcgcttaacccaatttaccaaatcgacgatttcatcgccaattcggcaaatccagttaatgctcagaagctaaccgtttcaaacgcactctatcgaaaacgtgttttcatcaacagcttcctgcgctttgctacacttatcaaatcggcgcttacagcgtcaattcgctaagttaggcaagtgctcagaagctaaccgttgatgacgcactctatgatgttgcgttgctgacaaattcttttaatgctgcgcctgttttgcctgcgctgaggccgacttgtagtttgaggcgtgcttttggtccattgaggccttggcagaaggtgacgcccatttgtttaagctttacaccgccgccttggtaatcgtagacgtcttcggcaatcccgttgaaacagcgagaaacaagtacgatggggatgttgcgatctaatagcgcttgaacagcgggtaaggttgctggtggtaagttaccagccccgagtgcttcgataacgagccctttggtgttgggttggttgatggcgtcgaataaagtcccatccatgccagcgtatgcttttaaaagataaacaggttcgacaagggttttgatgtcgcaaatttcagaacgaattaattcttggaagaaattcgcattgtgtttgctgaccaaaccgatgggaccaaaagttggcgttctaaaggttgcgacgttcgtcgtgtgcgtcttcgtgacataccgtgctgtgtgaatctcatcgttcatcacgactagcacacctttatcatgagcatcgtcagaagcggctgtccaaacggcactaatcaagttgtgtaatccgtctgcgccgatttcattcgacgagcgcatcgcaccagtcacgacgacggggatattgttgggaagtgtcaagtctaagaaataggcggtctcttcgagggtatccgtcccgtgtgtgacaacaacaccatcaatcccgtcttcttcagcttgttgaattcgattcttaaggtttaacatcacagcgggtgtgatgtgtggtgaaggcagattggcgaactcttcactttcaatgattaattgattatcgaacagcttttcaaagccggccattggattttgatctgtgggtgcaaccgcgccatcttcgtccgcagacattgcgattgtgccaccagtatggaggactaaaattttcttcatgtttaatgaacacctttctttaaatccgaattactcatctgtaagtatagcaaattttctgcaagagttgctgaaaaatgaaaatcaattgcttgtaattaaataacgttagtgatacatttaaggggttctaaaaattcggagtaggactgaagcgttaagtgctggtggaacggaatgtggacaccagacgaaaagcagcaatgcttgcgatttcagtaccgcattcgccgcagtattatttgtggcagctccaaaagggagatgctttttatggttaatggtcagatttttggtgttaagctagacactagacgcgttgttttactagctgttttaattgctttacaattggtggttgcacgctttgcaatttcactaacgattttcagaattagttttggattcatcgtcaccgccttaatggggtggtggtttggcccagtttgggcgggacttgccgccgttattggcgacctcatcaatagtttgatgattggggtcccaggtggttatttcccaggcttcacactttcagcgtttctaggggctttcatctatgggtgttacttctaccgacaaaagattacatggtggcgcgtgattgccgccgttgtgacagttgtgctaatcgttaacctcggtttgaattcatggtgggtgtcgattattagtcatacaccatttgggttccactttacggcgcgggccattggggaagctgccacattagtgattcatccgattattctatacatcgtgatgcatttcgaaccgattattagattaaaagatagagtattataaatgagtaggtgttatctatttgaagataacgcctttttttgtggaaaccggctttttatgctagaataacaaggattataagcagaagaaggatgaaataatgaagctattggcaatggatacctcgaatcaagcggtgagtgtggcactccttgaagatcatcaaattttaggcgaaatgactgttaatattcgtcaaacacatagtcagacgttacttccaatgattgatcaactattaaaacaaacaaaaaccaccattgaagatatcgatcgctttgtcgttgcagaaggtccgggttcatacacgggattgcggattgcggtgacaacggctaagtcttttgcttggacgcttaataagtcattggtcgggatttcgagtttagcattgctagcggccaatgtgatggatacgaccgccttgattgtaccgctgtttgatgcacgccgcgacaatgttttcgcggggatttatcagtggcaaaatgggacattgcaaaccgttgtggccgatcaacacgtttcactagaagcactactggcacaattacaattattggcagaacctgtttattttgtggggaatgacgttgcacactttaacgaacagattcaagctgcattaggtagtaacgcgcatttcgtgtccgccaaccataatttaccgcacgccagcgtcttgggtgaattaggcttgatggctgaacctgtcgcggatatccatggcttcggacccgtttatttacgcaagacggaagcagaagttaactgggcaaaaacgcatgatgagcgaggcgctgattcgtatgtggaacaagtttagggaatacctcaaaccccagatttgggtcaagaaagaaatgccttacacaactcggcgcgttgaaattgatgagacgacattttacttagcacgcgcgagtcaaaatgatattacggcattgttggacattgaacggtcggtctatgccggtcagacgccgtgggatcgttggaccttcactagtgagttgagcaagcgcaagacatcgttgtatctggttttatgccaagggactgaagtcgtagcgtttgtcggtgcatggttttcaaccaatgaagctcatattacgaatatcgcggtgcggccaagttatcaaaaacgtggtattggccactttttggtgcacgaaatggttagtttagcccacgattatcccagtcaaaaaattacactagaagtacgcgccagcaacacaagcgctcaagccgtttatcagcgattgggttttacagtggtgcggacgcgtcccaattattacattcaggaaaaagaagatgcattcagtatgtgtcggatattgagtcaataggagtcagtcatgtcggaaaaacgagaattaattttagcatttgaatccagttgtgatgaaacgagtgtggccgtcatcgaagacggtcatgttattttaagcaacatcattgctacccaaattaagagtcatcaacgttttggtggggtggtacccgaagtggccagtcgccatcacgttgaacaaatcacagtttgtacacaagcggctttagaagaggccgggattacttacgctgatttaacggcggtcgcagtcacttatgggcctggattagtcggcgccttattaattggcgtgacagctgccaaagcgattgcttacgcacaccacttaccattgattccagtcaatcatatggcggggcatatttatgcggcgcggtttgttaagcctttagaatacccattgttagctttactggtttcaggtggccatactgaattggtgtacatgccagccgccggcgaattcgaaattatcggtgatacacgggatgacgcagcaggtgaagcctacgataaaattggtcgcgtcctcgggattcaatacccagccggtaaagaaatcgatcggcttgcccacttaggtcaagatacatttaaattcccgcgtgcgatgctcaaggaagataatcttgacttcagctttagtggtttgaagagtgccttcattaacacagtgcaccatgccgatcaaatcggtgagacgctgaaccacgaagacttagccgctagtttccaagcgagtgtggtcgaagtgctcaccactaaaacgatgcacgccgcgcgtcaattaaacgtgcgccaactcgttgtggccggtggggtggctgccaatcaaggtttacgtgaaggtttggcgacagccattaaggcatccggaatggatttagacctcatcatgccaccacttcgattatgcggcgataacggcgccatgatcggggccgcagcgcatatcgaattacaaaaacaacaatttgctgatctaagtttaaatgcagtccctggtttggattttccatacggtgcataaaatacgaattcaaaaagcctgtcgataatttcgacaggcttttttgcttaaatggattgcttagttgattgtaaggtagtatagatgtccgtcggcagtgccactatcaacggactgagctgatccacgccaatcagtgttaaatcgtgcatagcacgtgtgacgagtgtgtagaggagatctacgtctgattgtgcgccgaaggtcttcttagagatgtcgtagccaatcacagcgtcgaactcgagccctttggctaagtataatggaaggattaggatgcctttgggtaaactacgggttgtttcaccgatgagtgtgacgtgttcatcaggtgttaaactagcgtagagttggtgggcaacttgttggttcttggtgaggatcgcaacggtcgcgtgttctgcctggagatggcggatttcttgggtcagtgtagcgagcgcttggtcgtttggcgtctcaatgacgcgcggtaggcgcccgtcacggctgaaggcttggagggctgtttcttttggcaagagtgccttggcgaagttggtgattggggcggtcgcgcggtaactcttggttaagctaatttggttgatttttaagcggggaaaagcagcggtcagttgatcgatgaagtggccggtttggtaggtcgccgtgaagacatcctgtgcgtaatcgccgagcacggttaatttcgcgttgggaaaggcgtggtggatgtagacgaactgagcgatgctgtaatcctgcatttcatcgatgaagaggtactgaatgccgtgattttggccgctgtcagttaataagtcgcgcaggtatagaattggggcggcgtcactgagcccgacgatgtggcgttcattgttatccgcgacttggcgaatcatggcgtcccaaaccttcgtagggatgtcggcagggcaagcaccacttaagaagtgttgatattctgtggattcatctaggaaataatcattgtagattgattcatagagtggggcgaaataactttgaacgatttcacgagcgatgaaagcttgttcatcatcgccagaatcgaattcgcggtcaccgacaatcgtccggtaagcatcatcggttaaggtatcgattttttcagcgacccagtcgagatgaacttcgaggttgatttggcgtttaagccgtttgatgagcgtgtttttagtggcgaggaatttgtcgccgggtaacatatttgcggggagtgcgagataaatctgattcatctggtctttagtaaaaaatgggcggtcttcgaagtatagatcgttgaatgccaacggttgggttgaggcttgtttaacgtaagcttcaattgcgtgcatgaacgctgcgctttctttataccggcgcatggcttgtgtcatttcaggaaaactggcttgatctttttcgaagcggtcgaagaggttctcaacctgtaagcctgagaagcgatgacttaagaactcggccatcgtcacttggcgcatgtttttctcgcctaaactaggcaggacttctgaaatataatggctgaataaacggttgggtgagaagagcaccatttggtcggcttcgagctgactgcggctgtgatagagtaaaaaggcgatgcgttgcaagacagctgaggttttaccactaccggcgaccccttggacaatcagtaagtcagcggttgtatcgcgaatgatatcattttgttctttttgaatcgtggcaacgatgttttgcatgtattcgtcactttgttcaccgaggacggcttgtaagagttcatcgccgacagtttcgttcgtatcaaagacgtgttcgatttgaccgttttgaatcttgaattggcgtttgagtttgaggtcaactttgacagggccatttggcgtctcataagttactggaccgagtgtcccattatagtagatactcgaaacaggggcgcgccagtcgtagattaagaaattgtcttggtcgtcgataaaagtggcggtcccgatgtagagtgattccgtttcaccatcttcggtgatgtcaatccgaccgaagtaaggggagttgacgagatcggtcaggcgttcttgttggctagtcagtaatttttcgttttcgacagcggcggcgaccaattgcttttgttgttggaccgcggcgttggtttccatgcggtcatcgacttcggtaatgttgactttcgtattgtcgccgtaacgttgttcgatgtctttggtttcattgtaggcgttggccaattgttggttaatcactgtgaggcgttggtcgacctgtataactgtgcggtcaacgcgcgcttgttcttgttgttttgtgtcttcgtgtaacatagcagcctccaattgttagttgttatattataagcgtcttggggtaaaaaagcgaccgattgacattcattttaaaatccgttagtatgacagtaattcaacagacaaagtgaaggataagtagcaactgatattttcttgaacaggaagcggcgggactgagaagtcgtcaaggagttggttgtgaattgggccttcaatcgggaattagtgagtaactaattcgggtagcacccttatcgcgtgagtggcacggatgattttcgtgcaatttaggtggtaccacgtagaggcgtcctaattgtttaatcacaattaggacgctttttttgagttgataaatcaaattggagggtattattatgaacaaaaaaattatcttaaccggcgatcgaccaaccggtaaattacacattgggcattacattggttcattacgcaaccgggtagcgatgcaagattcaggcgaatacgaaacatttatcatgattgccgatcaacaagctttaaccgataatgcgcgtgatcctgaaaaaatccggaacagtctcttccaagtggctttggattatttatcagttgggattgatcccgctaaaacaaccgtcttcgtgcaatcacaaattcctgctttgagcgaattaacgatgcattatttgaaccttgtgacggtttcgcgtttacaacgcaatccaaccgttaaagctgaaatccaacaaaagaattttgaacaaagtattccagcgggctttttaatttatccagtcagccaagctgctgatatcacggcgttcaaagcaacgacagttcctgttggtgatgatcaagaaccaatgttggaacaaacccgtgaaatcgtacggacgtttaacaacgtttacggacaagaaattttagttgaaccagaaggggtcttcccaccaaaaggcgaaggacgcctacctggtttagatgggaacgccaagatgagtaagtcattaggcaatgcgatttacctatcagacgatgcccaaacgcttgaaaagaaagtgatgtcaatgtacactgatccattgcatatcaaagtaaccgatcctggtcacattgaaggcaacacagtctttacctatttagatgccttcgatgatgatcgtgaaaaagtggctgaactcaaagcgcaatatcaagctggtggtttgggtgatgtgaagatcaaacgttacttgaacgaagtcttacaagcgaagttcgcacccattcgtgaacgtcgtgctgaatttgaaaagaatccagaagccgtttataagatgttagaagaaggtagcaagaaggccaatgctgttgcagaacaaacccttaaagaagtgcgggatgcaatggggattaattactttaactaatcctattcaaattaaaaaaacagttaaacaagtcgctgaatgacttgtttaactgtttttttatagactaatatagtgggataatagatgctttttgatggtactttaaagttgaatatgagagacttaattcaatttaagacagatgtaaacgctgtttttggtatataatttgagaagttatcaacatggagcaaaggagaattgatatgcatgatttaactaaaggtaatccgttgaaattaattatcttatttaccggcccattattgattgggaatatttttcagcaactctatagtgtcatcgataccttaatcgttgggcggacaattggtgttaatgcgttagcagcagttggctcaacgggtggattgaacatgctgattatcggtttttgtacagggaccacggctgggttgtccatcttgacagcccaacgctatggtgctcaagactatcgcggcgttaagcgcagctttgcgacgagcattctgattagtttggtgataaccatcattttgacagttattagtctattatttgctcgacatattttggtcatgatgaagacgccggccagcatcattgttgatgctcaacggtttattatgattatctttggtgggatttttgcctcgatggcgtttaacttactttcgaatatcattcgcgcacttggggatagtcgaacccccctctttttcttagtaattggggtcattgtgaatattgtgttagattttatttttattttaggctttcatatgggcgttgaaggggccgggtttgcgacggtctctgcacaaataattgcggctgtgttatgcttactatatatttatcgccgcattccggtcctcgttttacggccgaaggattttcgcgtgacgcgcaaagatgtcatggatcatctcaaggttggattaccgatgggctttcaatcgtcaattattgcaattggctcaatcgtgatccaaatcatgttgaatacattgggtgctagcgcggttgctgcttacacagcggctgggaagattgatcaattagcaactcaagttgggaattcatttgggattaccttggcgacatattccgcacaaaattacggtgcacgtgaatttggacgaatcagtaaaggggtccgccagacactaacggtgtcaatcatctttagtttagtgatgggcgcgttgatcattgcctttggacgaccactggttaacctgtttatcgggaacaatcaaccgcacgtgacggatttagcacaaatctacttccgctttaacagtagttgttactttattttggcaatcttatttgccattcgctataccttgcaaggtttggggcagagctttattccaaccttagcggggattgcggagttgttcatgcggatttttgccgggatcttcctcgtgcagcaattcggcttcatgggcgcaagtttagccaacccactcgcttggattggttcatgtttggtgctattgagttcctatttcaagacaatgcaccaactgaagcgtcgtgaagcaggtaagaatagggaggaacaggatgtttaaaaagtatttattggtcggcttatcgttgaccatgttggcgttggatggctgtcaggcgacacaatctagtcaaccaacgcacgagaatgcaccaacaattgcaaataaaaaacaagttaaaaaaacaacggcaatcttggctgagaagacctttaagtcaggcgacaatgcctatttagaagtgaaccataataaatcaacgttggatgtccgtcaatggcaaaccgaacggatcaagtatggtgcgttggatggtttaaatcggacaacgactaatacggctttcttatcgaaagagacgttaggccgttcaaacacacgccatcgtcaaacgtggcaaccaaccggctggcataatcaacccgtgatgattgatggccaacgggtctttcctgaaagtcgcggccatttgattgcatacgcgatttcgtttaatttcaaccgagatggtgtttttcaaaaaggggaactcggcagtagcaataatccgaagaacttagcgacacaaacggtcttcagcaatcaacgtaccatgcagatttttgaagatcaggttcgccaagcactaacgcaaaataaaaaggtgatttaccaagtgacaactgtgttccgtggagatgaattgatgccccgcggttactgggttcaagcaatctcaacagataagaagttgaactttaatgcgtatgtttggaatgtacaacctaagatgcaatttgactatgcaaccggtcgcggccattacgatggatcgatggcggtggtggatcagtatgcaggcaatccttatcagaattaagtagaaccaaaaaaagcgccgtctcaagattaattgagacggcgctttttttgcttaatgcacaattactacttacttagaaactaaccgttttaaacgtactttaaacatgcttcgatagccataaccttccggttcactacacaacaaaaatcatggccggaaaccaccataattcctggtgataggctaatcttcaagtgataaacggctatctcagcactttatggcaggtcattgcctgctgccaagtataggtcgtaccattctcttctggtgagggtgactttgtctgcttcgcagatttgtgctaggcggccggggttcattgtgccgacaacgacttgcatgctggctggaattctgaggagccatgcgctagcaattgcgttgacgttggtgtcatgtgccttggcaactgattggagtgctgcgtttaattctggaaatttcggattatcgatgaagaccccttcaaacatgccgtattgataaggactccatgcttgaatggtcatattcgtgaggcgtgagtattctaataaaccaccatcgtgatgaatgctgcgcgcgtcttgcatattggtatgcacgccggcatcaatcataccagtgtgcatcaaactgaattggagttgattagcaatcaatgcttgcggcactgcttgttggagtaagtcgacttgaccgggattgaagttgctgaccccgaattggcggactttaccactattttgcaattttaagaaggcttcagcgatttcatccggttccatgagtggatcaggtcggtggagcagtaaggtgtcaacatgatcaagttgtaatcggttgaggctggcttcaacaccttcgatgatgtgttcctttgaaaagtcgtacatttttttgccaatgccgactttggtttgaacgagcacttgatcacggtcaatatgactggccttaagggcgttcccgaatttaatttcggaagcaccatcgccgtaaatatcagcgttatcaaagtaattaatcccatgttcataggcggtttcgagcattgtcagggcttcttggtcgctcagttgtgggatgcgcatgacaccccagacaattggcgaagccattaagccgctgccaccaacattgattttttgcactatcaatcactccttttatttgatgcttttaacctaccacaaagtaccattaatgaaaagaaaaggctttcctgaatttcaggtcgtcactggcgacaattttcggtatactaatcacaatagacaggagacagttagatgacagataagaaagcacaggcaccgcggctaaatccacaacttgagacggtacagcttactgcgtttgaaccagatgagacttatgaaggtttgtttttcgaagaactaacgttgaagcaaaccgaagttgagatgttattctttaaaggctgtttatttaaaaattgtcagtttgaacaagtcgactttaataactgtgattttcaagatgtgcaattcgaatactgcgcgttgttaaactgttcgttgacgaatgatcccttccaacgagtcgcgtttaatggttgccagttgattggttccgattttgcagaggctggtctgaatgatgtcacgttcgacacttgccaagcggattacaccggctttaactttgcgcggatgcggcatgtcgactttaaagattgcagtatgcaagaagtctcactcgggcaagttgattggcagtggctaacaatgatcgggaatcgtttgaacggcatggatatgactggcacgaatttgaagaatctcgatatcagtcagaatcaattcgaaaaagcgactttcacgctcgaattattacgtggggcgaccatcagcacagaacagacgctcgtgattatgagcgcgttgcgaattaacgtccgctagcttgccggtttttaaaggcaattatcagacaactgattgttgcgatgagcatcacaagcacagcgaagaaatcttggtgcaacagctggcagaggccgctgatacataaagcgatgaataaaataagtgggattttaaggttggctttcattggtcattcccccgtactttaatctgaaaaggcagcgacaaaatattgtggctgccttttcgtttgatttttaataattaatcttgtatgtcaattcaacaaaatgaccgatttgacggctattgataagttccaatggcatatcggttaagtgcgtgctgaccagtgaaatgccgtcacccaggagaactggcgcaatggtgatgatgagttcatcgactaactgggctttaagcaattcggtaaagatttctgcaccacccacaagccagatattgccgccatcttctttttttaattgacgcatgaactcaggaatattcccagcaacgacatgtgttcgatcttctgtatcatgtaacgttttcgagaagacatagccgtttttatcttggtaaggataggtgccggctaatttaagactttgttcatatgtcttacgccccatcacaacggtatcgacggtgcgttggaaagcttgaattgcagcgtctgattcggatgaatcgagtgcagctaaccaagcagtgctaccatctttttcagcgatgaagccatctagactctgagcaaggtataaaattacttttcgcgaatttggttctgtcatagtcaacacgtcctttaaattaagattacctttattataacagttttaaccgctttcatacattctaaaccgttggtaatttaactggatttggcttatcatgaaaagcaaagctgtttactcaaaggagaccaaaaatgacaactactgaattttccccagaaatccaaagtttaattgaccaggttcaaaagaattatcctcaacccattaagatccgggtcgcagacgcagcgtctgggatgttaaaacatgatcaggcacaacgcgttttaaataacgatggcagcttggcaatcttaattaccgatgcgacagcggccgattatgctttatcacatgaattattacacttactattattatcaatcggttttccacaaatcatgaccgatgtcaccacgcaggatgcgcaactcgatgaacaattggttgcgaccggcacaacgttgtacaatgctgctgtgcatatggtgattcaaaaagaacaagaatcccatggctttgtggatgttgaaactaaacaagcctaccttgaaggtctacgagataatctgaccccggaaaaagacgatcccgaaaatagatgggtgattttccgcgtattaacgctgttagatgccctcgtcttctttgatggtggcaaccaacaactgttaaaacagtggacggctgattatccaattgcgtttgcccaagccgaaattctctatcatgtgttggtacgcaaaacaattgattcaccattcacgttacggcgggctgtgattaacttgtgggttgcgtttgatcgcgtgttatcaaccctaggatttgctgaaacgaacctccaacaactcttgacattgacgccggtattaagtgaacggcaactacgattagaagtgcgccaagtctacgatattttacattccgaaaatttatttgcgaccgcaacgaaccaaaaagcgtatgttggaattggtaagagtgatcaacaaaatgcttttgtcttagggattccagaagacaaggcaacaccggaatatttcaaacgattgtatgatttatcagtgcaagccttcttagatgaaattggaatgccgtattcattaagaaaatgagtgcgttcaagctggtcaacttttgagcattagcacagggaagcgaattagcgacgcagtcgatgatttgattcacagtgctaagcacagaaagttagcttgaaaagcacgttaaagaacagagtgcgttaattcgcggttagcttttgagcacttgcctaatcagacggataagcgccaaaggcgattggccgactgatgtagcaaagcgcagaaagctgcgaattaaaagcacgttaaaaaggagtgatggtgatgacttttaaatcaatgttgcatgcggcacagcatgttgttttcttgacgggtgcgggggtgtcaacggcttctggcattccagattatcgatcgaaaacggggttgtatcgtcagcaagccaatccagaatatttattaagtcacacgaatttaatcaccaatccagccagtttttatgaatttgtcacgcagcagatgtattttcctgaagcaaaccccaatgtcattcaccaagtgatggcgacgattgcgaatcaaaaggggcagattatcacccaaaatgttgatgggttgcacacaaaagcgggcgcgcgggatgtgattgaatttcatggtagtttataccgtgtcagctgccaaaagtgtagccaagcagtgccttatcaggcctatttaaaggatatgcatcatcaagattgtggtgggattttgcggccaaatatcgttttatatgaagaaccgattgatccgacggtgattgaacggtcgattcaggcgattgaagcggcggatttaattgtcgtggtcgggacgtcatttcgtgtttacccatttgcgagtttaattgaatatcgccgtccagatgcccaattagtagcgattaatcaagaggcattacaatttgaaatgccagtcactatgatacaagcggatgcgacaaccgtttttgccgcactagcaactaaggagtgagcccatgttaactgaacactatcaaaaaattgatgcaattgatgcccaattggcggttttatttgaagaacgcatgcaagtcaccaagcaaattgcaacaatcaagcatgaacaaaaaatcggcttgacggacatccaacgcgaaaaagcggtgatggatgcgcgccttgctgcggttaaagatccagcactcgcagattacgtaagggatttataccaaacgttaattttaatttcgaaacaatatcaagtaaaattgatgaaggcgatgaaagaagcagaagaaaaataatgtggaaagagcgaaacggagacggagcgctcttttttgatggaaacgtgccgagtctgccatatctttccggttagctacgtatcgcaaacgatcgacttcgtcgctcattcacgatgcgctgctaatcctcaagatataaccggcagattcagcactctaatttgaaacgtgccgattcgaactgccttttccggttaacctaaaaatggcaatcatggctgaagagcgccataatccccatttttttgttaatcctcaaagccaacccgttcgactcagacactctaaacgtgccgagtctgctatatctttccggttagctatgtatcgcaaacaatcgacttcgtcgctcattcacgatgcgctgctaatcctcaagatataaccggcagattcagcactctgatttgaaacgtgccgattcgaactgccttttccggttaacctaaaaatggcaatcatggctgaagggcgccataatccctattttttgttaatcctcaaagccaacccgtttgactcagacactctaaacgtgcttcctgtcgcagtaatttccgcttaatctaaaaatggtattaatcctaaacccctggattaataccatttttgaattaatgctcaattactaaccgcgacagtcagcactcttttgcttaatatgctaaaatgaaactaatttatgagatgtgaggctattgaactgtgactaaacgacgctataatttagcggtaattcgctatcgcgggactttactattattgaatcggattaagcccccatttgctgggctttggaatggcattggtggtaaaacagaacccgatgaaacgccaatcagtggtatgcaacgggagttatttgaagaaacgggtttacaaaccaaacaatacacactccaaaatgtggggtggattgattggcacatcgatggtgaaccgattgcaccgattgacatttttttagtcgatattttaccaacggtgcaactaccactttatccggtcggaatgcgcgaaggcgtgcttcaattatttgaaccagaatgggcacaagctgctgataatcaaggaattgtggcagacttacaggccattttaccaactgttttaagtggtcagctcaatcggtatgatacggattttcatgcagatcagatgattttctttgaagcaattcccattactgaaccaagagaaggagaggaagcactatgatgacaaaggaccaaacgatgatggtcttgatggttttaaagaagaagttgcaagggattcgtttttttagagtcgtcgaagaactgttctcgttatacattatttttaaattcttaactgcaacgggccaggtacagcttttaggggtggcgttttctgaggggcgcgccattagcttaatgttgctgctgctagtcatcgactttagcctatcgcggattcggttaaattataaacgcatgggacaacaattaattgtcacattgaaggatttaacggaacaagaagctttgttcattcaacaattccaacggttctagaggtgtggatatgataacaattggattaactacttggtcagaacatcagtcattaatgcccagcaaaaagcagttaacgttaaacgactacgcgcaatttctgccagtggtagaggtcgatagtttttattatggcttacgcgcaccaaccgtcagcgcaaactggttgacgcaagtaccagccagttttcagttcattgttaaagcacaccaagcaatgacccgccaagaagactacgccgattttacgagtactgaaaaagaattgtttgtgcggtatcgccaatcaattgaaccgctaattaaggccggccaattacaggcggtcttatttcagtttccgccattttttcaactgaatcaggaaaatagtcagtatttacgacaaattcgcgcgtggttaccggatgtgccaattgctgtcgaattccggcatcaatcctggtacgatgacgcctttaaacaacagatgtacgcctttttgaaacagttaaatatgacgcacgtcatcacagacgaagcacaaacaccgacgaacagtgtgccgtttgaaccggttgtcaccaatccggcgtttgcgatgttgcgcctgcatggtcgtaatatggccggctggcagaatccgggtgcccaatggcggaagcaacgaacattgtatcgctataatcaagatgaattgcaattttttgcggatgctgtacggcagattaaaaatcaagcggaacaagttgccgtgatttttaacaataattctggtggggatgcagcggataatgctttgcaattacaacaattacttgggctagaatttcctgatttagccccgaaagcacctgaacagattgatttattttaatgaaggcttagtgtgagttgtcgtttaaatgactgctcttttgtgctatactttgattacttatatggcattatttaagcaagtcgagaattgttaagattctcgtttttttaattaaggagcgaacctaatggcagagacaaaaccaacattttacgtaacgaccccaatctattatccatctggtaaattaacgattggtaactcatatacaacaatcgccgccgatgtcatcgcgcgttacaaacgcttgatgggctttgatgtcttcttcttgacggggacggacgaacacggcttgaaaatcgaacaaaaagcagctgaaaagcatttagctccacaagaatatgttgatggcatggctaaagacatcaaagcattatggcaaactcttgaaatttcaaatgacaaatttattcggacaacggatgaataccatgtcaaagcggttcaaaaaatcttcgacaagttattagcgcaaggcgatatctatcttggtaaatacgaaggttggtattctgtttctgatgaagaatacttcactgaatcacaattagcagaagtttataaagacgacgatggcaatgtgatcggtgggaaagccccatctggtcatgaagttcaacgggtcgctgaagaaacttacaagtttaagatgagcaagtatgctgatcgcttattggcttattatgaagaacacccagatttcatcgaaccggcatcacggcgtaatgaaatgatcaataacttcatcaaacctggtttggaagacttatcggtttctcgaatctcatttgactggggaattcacgtttcaagtaatccgaagcacgtggtttacgtgtggttagaagcgttatcaaactatatcacagcgcttggatacggttcagacaacgacgaattgtttaataaatactggcctgctgatgtgcatctagttgggaaagaaatcgtacgattccatacgatttattggccaatcttcttgatggctctagacttaccattaccaaaacaaatttttggtcatggttggttgttgatgaaagacggtaaaatgtctaaatcaaaaggcaacgtagtttatcctgaaatgttagtggaacgttatggtctagatgctttacgttactatttaatgcgcgcgattccatttggtaatgatgggacatttacaccggaagacttcgtcagccggattaactacgatcttgccaacgacttaggaaacttgttgaaccggaccattgcgatgattaacaagtacgacaatggcgctgtgccagcttaccaagctgacgtgacaccgtttgatgctgacttacaaaagacagctacagaaacaatcgaacaatataccagcttaatggatcaattgaagttctctgatgccttagataccgtttggcaattaatcagccgggcgaataagtacatcgatgaaacagaaccatgggtcttggcaaaagatgacagccgcaaagcggaactcgatagtgtcttagcccacttggctgagagtttacggattgttgcgctcttattacaacctgtgatgacgcatgcaccacgtgatatgtttgcacaattagggcttgatttcgatcaagttgcgcaacgtgaattggtttatgggacattcccagccaatattcaagtggttgctaaagggaccccaatcttcccacgtttagacttggatgaagaagtcgcatatattaaggatcaaatgggtcaagcgcaaaaagcgggcttagtgaacgaaaaagtgaaggctaagcaacaagcagctgaagccaaagctgaattcgatccaaaagcaacaacattagtcagtgaaaaggacgccatcaagtttgaagatttcgatcaaaccgaaattcgcgttgctgaaattaaggcagttgccaaggttgaaggcgctgataaactattgaaattccgtctagatgctggggatcaaggtgatcgccaaatcgtttccggcattgctgaattctatccagactatgaagcgttagtcggtaagaaagtcttagccgtcacgaacttgaaaccacgtaaattgcgtggcgaattgagccaagggatgttgttatcagcagaacatgacggacaagttgaattagcagttgtgccaaacaacttggtgaacggctcacaaatcggttaatttaaaataacagaaacgtcaaaagggctaaaaggcatttacattctgtaggccttttagcctttttaatggaaaagagtgtgttgccagtggttagcttttgagcatttgtctaacttggcgaattggcgatggaatcgccggtttgaaagtgtaacaaagcgcagaaagctactggcaagagcacgttttaactgtcagaatgaggacactaaaaggagattgaaatgcaaatttttgattcacatacgcatttgaatgataccccatatgcagggcaagaagctgattttatcgcgcaagccgctgaactcggtgttgttgaaatggcgattgttggttcagatacagtattaaatgagggcgctttgcgcttagcagcgcaatatgaacctttatcagccattatcggttggcaccctgaatcagccaaagattatcacaaggcagaagaaaccgtgctgattgaccaattacaacgaccagaagtagtggcgctaggtgaaattggtttggattatcattgggatacttcgccacgcgatgtgcaacaaaccgtttttgcacggcaaatcgagattgctaaatccttgcatatgccaatttcagtgcacacgcgggacgcgttagaagatacgtacaagattctaaaagaaacagatgtccgtgattgtggggggattatccacagttttaatggcgatgttgaatggatgaaacggtttatggatcttggcatgcagatttcgttcagcggtgtggtcagttttaaaaatgcgcatgaagtccatgaagcagctaaagcatgtccattggacgtgatgttggttgaaacggacgcaccttatttaacgccgacgccttatcgtggtaagcagaatcaaccaggctacacacggtatgtggtagaagcgattgctaaactcagagatgtggcaccagaagaaattgcggcagcgacgtatgcgaatgcccaccggatttttaagttaggagcactatgaaaaaaacaattcaagaagtgattgttgttgaagggcgcgacgatacgaagcggttacgggaagttttcccagatgtttcgacaatcgaaacgcgcggttcagcaatcaatgaagaaattatcgaaaaaattgcgctcgctcaagaaaaacgcggggtcattgtctttaccgatcccgattttcatggcgagaagattcgtaaaatcatctctcaaaatgtaccgggcgtcgaacacgcctttttaccacggacagaagcacgtccggaaaaagcaggcggcagtttaggcattgaacacgcaaaaccagcggcgattgtccaagcacttgagcatctattaacacaagatgaagaagcagacgaacaaatcagtcaatcggatttattaacggcgggcttgattgcgggggctgattcaaagcgacggcgcgaattactcggcgaaattttgcacattggttacaccaacagcaaacaactttacaagcgtctcaagatgttccaagtgacgcaagctgaatttggcgctgcactattacaaattaaacaggaattaggagattaatatggaagatattgcaaatcccgagcgtacccggaaaattctcaaacgttacggctttaagtttaaaaagagcttaggccaaaacttcttaaccaacatcgccattttgaaacaaattgttgaagctggtgatatcaccaaagatgacgatgtgattgaaatcggccccgggatcggttctttaacggaacaaattgccagaaaagcgcatcaagtattaagttttgaaattgatgaacggttaatgccggtcttaaaagatactttgaatcactaccataacgtcacgattttaaaccaagatattcttgaagcggatttaaaaacgattatcgccgaacaatttgatggtaagcataatctcaaaatcgttgcgaacttaccctactacatcacaacgccgattatgttgcacttactagaagcaggcttgccaattgatcgcatggtcttaatgatgcaaaaggaagtggcagaacgaatcaacgctgaaccaggttcaaaggcttacggctcattaagtatcgccgttcaacttcattcagaagtgaacttagcctttattgtgcccaagacagcctttatgccacaaccgaatgttgattcagcgattgttgaattagtggggcgcaaagcaccacttgtaacggttgataatcaaaccttatttgatcaattggttcgtggcgcatttgcacaacgccgaaagacattatggaataacttgcaaaatcaatttggtaaacaagatgaagtcaaagcagctttaacaacagccttagaagcagtcgagattgcaccgagcgctcgtgctgaacaattgagtatccaacaatttgcccaattaagcgatgcgctgaataatcagccaatttttgctaaaaaagctaagtaagtaattgccaaatcgttggtacaatggtataattgcaaatttttcgtttatatggtatactatccctcgaagaggtgaagcataatgccaaccacacttgccaatattaagaacggtctcgatgggcatatcggagacaagttaatggttgtcgctcaagctgggcgcaaaaaagttacaaagcgaaagggaattcttaaagaaacctttccagcagtatttgtagtcgatttagatcaggatgaaaatgcttttgaacgtgtttcatacagctatgctgatttgttaacgaaatcgattgagattgagtttgatgaagaaccaattgtcctatagtttaaaatagaagaatagagtagcactcaaccaacgggttgagtgcttttttttgttcaaaaggcagattgacgaatcgccatatacttcacgtggttgattagatgttgacattcgttcgataaaacaatatcatatagaatgtttatgacgtatacaaaagggagaaagaatatgtttggcaattggagagagaataaagtgaagttaggtgggttcattattatgatctgcttaattccgattttactattactaatcacatttaattttattaagtacgaacagaccactaatattaaacatatgaaagtcgcggttgtgaatcaagatcaatccgcaacatttaaagggaagaaggtggcagttgggcaacaggtactaaaaacgttgcgcaatgatcaccgggtcgattggcaatttgtcagtgctaaggatgcaaaagcgaacttagctagcggtcgatacgcgatgcaggttgtcttaccgaaagacttttctaaaaatgcgacaaccgcgttagataagtcacctaaagtcagcttgttaaaagttgaaacgtctaagaaaaataactacatggccggcatgattacaacccaagtcgtgaaccaaatgaagggcagtgtcgttcaaaaaattcaagaagcttataatcaagccttgcttggtgcaatcggcacgctaggcagtggcgtacaagaagctagcaatggcgttaaaaagttaaacacagcagccggtcaattatcaaatgggagccaacaaatctatgataatttaaatgtgttgcatagtgggacacaacaattggcagatggtagtgcgccattggcaagtggcgtgcaacaattaacaactggtgctgggcaactttcggctgggcttggagattatacagctggcgccggtcaaattaatgccggtttaaaccaactagcagccaataaccaaacaattttagctggtggccaacaaatcagtggcggtgtcgaccaattagctgatggcactaagcagttgagtgcaaaactaactgaagcagccgatggaattgaatccagtttagatggtaatcaagaccaattaacacaattgaaagctggtttaggcgctttaaatgctggtattcaagagttagatcaaaaagttaaccattccaataatgataattccgaaattatcaaagcagacttattaaagattgcggataatacaaaaaatacaggggcacttttacaggatagtggtgcgaatttaagtcagattaacgataaagtgtacaatactgctaaacctgatagtgttgcaaacagtttacaagatgcaggaaatcaactaaaagccttacaagatttagcggtaactaacggtaagtttgcaaagtttttaattcagaatccaactattttgaaagcgttgctggatattggagatgcagcaaaagcagacttgctgaatgctggcagtcagttagagtcttctggcacgaacatgaaggctattcaagccaacttaggcacgatgggcagcaacatgagtgatactggtgttcaactacaggctgtttcagatgaattaacaaaaacggctgataacatggcacaactaaaagccggaatcgcgaagatggcaagccaagaccaagcgccgttagcactaaatggtgctactcaggcgattgatacactgacagcggggttagccaaagtcgacactgggttgaaacaaaaaggaaatacgaccgatacaatgggcggaattcaagctgctgacatgattcatgccggcttggttcagattcaagatggtctaaaagggaaagctggtcaacttggtttaatgtcaggcttaacgacttatctgaatggtgtttcgactgcagctgcggggagcaatcaattagtcgcgaataacaacaagcttaatgccggcggacaacagctaacaaatggtctacaagaattaaaccaaaaagcaccaacgcttgtttctggcattacacaaattaacgagggttcaggcttattggcagatggtgctggacaattaacgactggcttaggccaagcgggtgctgggattagcttattaaacgtcaagttaatcgatggtagcaagcaagttgccaatctttcaacaggttccgcaaatgtagaacatttcgtgcaaccagtcaaagatcaattactatcagatacaaatcatggcgcattaattaataccttctcgccattagtcttaacacttgtcttctttgttggagcaatgttgacgcaattaacactttatcgctatggtgaaacattggcacatagcggtcttaagcaacggatgttggttgtagctggcgtagttgtcgcacaagccttattaattgatatctttgcaaacctttttggattgacgattgcacaaccgttcgcgttcttcgtcttaagcatgatgacgagtgcggtctttacccttgcatgtttagcattggataaactctttggaacgatgggaattttaatggccttcgggttattgttcttacaactcatcattacagggggactcttcccgaatgacatgctttcaggcttctatcgtggtgtggcaatcttcttgccagggacttacacgattagtgggttcgaacaagttgtcaacggcaatggttcacaactttggttagtcttaatcgtcttggtgatcttttgtgcagtgttcttcgccggtttgttcggcggagagttaaaacaaaagttaacgcaaacaccaaatagtcaagcttaaagatttgtggtacagttaagaaataaataaaaaggtgggaaatattgtgaaagatagtcaattgttggatgaatacgttgaactttacatgtcggcgattaaatatgtcgaagacttggtttctgaaccaacgcaagcttaccaattgtcttttgaacaatatctgattatgaaagagattgctgatgataattcagtgagtctaattgatattgctaaaaaacgaggcgtaacacgcggtgcaatttctcgacagattcgtgttttacttaaattagactatattacacaagaaattgatcccgatgatcggcgccggttgattttaaatttaacgccgtctggtcaaaaaacagttgaagaattaaatccgaagatccataatcggtttgcctcgtggatggagacgtttggtaaggaaaatgccaagcagatgcttgatttaatgaatgaatttagacataagattatggtaaaagataatcaataatatcgactgaagagcactgacagatgattgtcagtgcttttttggatgcattgttaaaaggttggtttttacaagcagatatgagtataatgaaacaattaaatgctaggtaaaaggtgaatgtgatgcaacgaattgaaaaagcacctgctaaaatcaatctcagtttagatgcactctttctacatgacgatggggaacccgagtggcagatggtgatgacgtcgattgatttggcagactatgttcagataacattacgcgatgatcccgcaattgaggtccgcacatcaagtggctttttgccagaagatcagcgtaacctggcctacaaagcagctcaattattacaacacacctatcagattccaaccggtgctttaattgaaattgataagcatattccagttgcggctggcttaggcggcggaagttctgatgcagccgctgttttacgggggttaaacgaactatggcaacttggtttaacgcgcgaacaattggcgcgattagggctacaaattgattcagatgtgccatattgcgtatatggagaaaccgcccttgtcactggcaaaggcgatcagatcaaaccactcggatcattaccgaatttttgggtcgttgtcgtgaaaccggaagtcagtgtttcgacgccgcggattattcgtgcattggattgcgaccagattcaacagcatccacaaactgaggcgctggttgcagccgttgaagctggagatttaaatgcaatgactcgcaatatggggaatgtcttagcaccgattacgactgaacgttatccagttatcaagcaattaagtgagcggttattgcagtttggtgcggatgttgctcagatgagtggtagtggtccaacggtatttggtatctgtagtcagtattcacgggctcaacggatttataatagtatgtccggattttgcgctgaggtatatctggttaaaccattgaaaccataataaaacgccgacaatcaaatggttgaggcgtttttaattggcgtaggaatcgctttaatgggataaaagcgaacaattaagctctttttttaaaaaagactaggatttaaccgaagatttctatataattgattggtagacagtttttttcggaaataacagtaaagtaatatatagaggggtattcaacatgaaagttagaagaagcgatcgattaatcgatatgacacgctatttattagaaagaccacatacgttgattccattggcattcttttcaaaccgttacgaatcagctaagtcatcaatcagtgaagatttatcaattgtgaagcggaccttttttaatcgtggcacagggatcttagaaacggttccgggcgctgctggtggtgtgcgctacatgccaatgattaaacaagatgaagcagaagcttttatcgctgagatggcacaacggctttcagaaaatgatcgcttattacctggtggttacgtctatttatcagacttacttggacgtccagaagtattacggcaagttgggcgtttaatcgccaaccaatatgtgggtaaagaagtgacggctgttatgaccgttgcaacaaagggaattccaatcgcacagagcgttgcgatgtacttaaatgtgccatttgtaattgtgcgccgtgattcaaaaattactgaaggttcaacggtcagtgtgaactatgtttctggttcatcagctcgcatcgaaaagatggaactttcaaagcgcagcttacctgaaaattccaaagtcttaattgtcgatgatttcatgaaaggcggcggcaccgtcaatgggatgaagagcttgattgaagagtttgattctgaaatggttggcatttctgtctttgctgaatcagatttcgaaggcaatcggatggttgatgattacacatcaatcttgaaggttgataaagttgatattgaaaataaaacgttaagtgtcagttatggtaattacttaacaaagaatgcagatcgcttagcttaaacgatttgatagcacccggacaggttaattgtgcgggtgctttttttatttgaagtgctttcggacagtttccaagctttgtccgttgcataaatgacagcggtaacatagactgaagttatatttaagaggaggttactatgaaaaaaataatgaatgatccaagccaaattgtaacggagatggtccaaggtttagtgcggagttatccagaccaactcaaacaaattccaggaacagaagcagtgatgaaaatcgccgatttaaaacatcggccacaagtcgggattgtcagtgggggcggtagtggtcatgaaccaacgcacgctggttttgtcggcgatggcatgttgacggccgctgtgtgcggacaagtctttacatcaccaacacctgatcaaatttatgaagcaattaaagcagctgacgcgggccgtggtgtgttcttagtcattaagaattattcaggcgatgtgatgaattttgaaatggcgaaggatatggcggctatggatgatattgacgttcgctcaatcgttgttgatgacgacattgctgttgaaaatagtacgtatacgcaaggacgccgtggtgttgcggggacaatcttcgtccacaagattctgggtgcttatgcccgtcaaggtgctggtatcgaagcaattgaagaattagcgcaccaaattacaccgaatattaagacaatcggggtcgccttatctggcgcaaccgttcctgaggtcggaaaaccggggtttgaattagcgcctgatgagattgaatatggtgtagggattcacggtgaaccaggttatcgccgtgaaaaattacaagattcgaaacacctagcaactgaattagtcggcaagttaaaagaagcccaccacatgacggccggcgaacattttgcggtaatggtaaatggcttaggtgcaacaccactgatggaacaatacgtctttatgaatgatgtcttggacctcttggccgctgaaaatgttgaagtcgacttcacaaaagtcggcaattatatgacctctttagatatggccggtgtgtcattaacaattatgaaattaattgaacctggttgggttgctaaattagatgaaccagtcacaacgattggttggtaaaggagagataccatgttaacagttgaaaatacattgaaatggcttgaattgtttgatgcaaaaattcaagctgaaaaagattatctaagtgaacttgatacaccgattggtgatggtgatcacggtaataacatgtcgcggggcttgttagctgtgcatgacgcattgaccaagcaacagccaaccgatgtacaaggtattttgaaaacgactgcgatgatgctcatcagcaaagttggtggggcttctggtccactctatgggacagcctttttagaaatggcaaaactaagcagtacgacacttgaagtcggcccattattggcagccggtttagaaggaattcaaaaacgcgggcatgcacaagttggtgaaaagacgttgatcgacgtttgggctcccgttgtcaaagcggttgaagatggtactttagatgtggctgcaattgaagctgccgtcgaatcaaccaaagatatgcaagcaaccaaaggtcgggcatcttatgtcggtgaacgctcaatcggacatgttgatccaggggcggcttctagtggatacttatttactacaatgttaatggcgggggtattatcatgagtgaatatggtgttgtgattgtttctcacgtaccagaaattgcggccggtgtggcgcgtttaattaaagaagttgccgctgatgtttcagtaacgactgctggtggcacggacgaaggtggtattgggactagcgcaatgaagattcaaagcgcttttgaagccaatgcagggcaagaattgttagccttctacgacttagggagcgctaagatgaacctcgaattggcccaagaactaacggataaaacggtgcatctatacgatgttgctttaatcgaaggttgctatacggcagcggcattgttgcaagcagggacggatttagctgcaattgaagcccaattagcaccgttgaagattaaataagaagtaaaaactgcttaaaatgatgtctgttttggagactgagtttaagcagttttttatatagaataatattcaaaagaaaagatgatttttaataatgtaactagtaataactttaaaatattgttgaggacggtaatgtgattttaaaatacggtaagctatgtattaaatagatattgctgttatatttaaataaattaagaatgaatactatgattaacatattattaggaagattcaggttgaaaaatattattgttactggtggggccggctttatcggttctaacttcgtgcattatgtggtgaataaccatccagaagttcacgtgacggttttagataaattaacttacgctggcaatcgcgctaacttagccggtttaccagcagaccgtgtggaattagttgttggcgatatctgtgacgctgaattagtcgataagttagttcaaaagacagacgcagtggtacactatgctgccgaaagtcacaacgataactctttgaaagatccttcactctttattcaaacgaacattatcggctcatatacgttgattgaagcatgtcgcaagtataatgtgcgttatcaccacgtttcaaccgatgaagtatacggtgatttaccattacgtgaagacttacctggtcatggcgaaggcgttggtgaaaaattcactcctgaaacccgttataacccaagtagcccttattcatcatcaaaggcgagctcagacttgttagtccgggcatgggtgcgttcattcggcctacaagcaaccatttcaaactgttcaaacaaattatggcccttaccaacacattgaaaaattcattcctcgtcaaattaccaatattttaagtgggattcgaccaaaactttacggttcaggacaaaacgtgcgtgactggattcatacgaatgatcactcaagcgccgtttgggcaattttaaccaaaggcaaaatcggtgaaacctacttaatcggtgccgacggcgaacaaaataacaaagatgttttggaattaatcttagaattaatggggcaacccaaagatgcttacgatcaagttaaagaccgtccaggtcatgacttacggtatgccatcgattcaacgaaattacgggaagaattaggctggcaaccagaattcactgattttaaatcaggcttacaacataccatcgactggtatcgtgacaatgaagactggtggcaagcagaaaaagcagctgtggaagccaactacgctaagaatggtcaataaatatgaaattaaattttgatgggattatcttataattaccgttgttcatataagtgtcctgtccgtaataataaaccgttaattgtatcagttaatgtcatttttagggcagtgattacttttgaaactgattggggatgacgactgcggagccattcagcggtgtaagcaactaatgcgttggaaagaaaactaagtaaaaaggcttggtagtcggtggataacgtaatgtgatgggcgctagcaagatcttgaataatccgattaatcagttgatggacgtgatgaataaaatggcgttcgaaggcgttttgcccttcaatcgacaaagcattttgatagaaggcgcggttagcatcgaagtagttaaatagttgcgccaacacctgtgtccaatggatatagctgagatgctcgtcgatgtagacaccgatttcttgatcgtaaatccaatctaataacgcatatttatcagggaaatagtcataaaaggtttggcgtcgaatgccagttttattcatgatggtggtgacgctagttttattaaaaggttgttcaaccattaattgtttaaaagccgtggcaatcgtttgttgggttgtctgagtcatcagggcatctccttttgaacgttattaagtaaaaagtcgtcattcaagctagtgaatgacgacttttgtattatatggaattgcggtatagaaccattgggcatcagctactgataaacggatacagccgtgtgaattagcttttttgcctaattgctctgcttcttctggaatgaaattgccagcttcatctgtgggcacactgtgaaaaagataaataccatgatctaggaaagagcgccaatatttggcaccttccccggaatttgcattgaaaaatgagtcgccgtgttcagcttcgatatagaaggtaccagttggtgtgggtgactcaggggaaccggtcgaagcatgcattgtgtacaaaagatcattgccatttttaaggtagacacgttgctgtgcaattgaaacgtcgacccataaatcgggttgttcgtctaaattaggatatggtttgttttcggaaggcgcacgccagtcaattggtgtcgggtgagccgctttttttgattttatcgattgttgcctcgcatgcgattgtgatttggtagaggacgtgactgcggcttggtgtgtttgatgccgagctgaggtagaccaatacccaccaactagtaaggcaatggcaacaatgatgctgccgagcattaatcgaatgttgtttgtcagttttggcatggccgacttccttccgcaataaagtacctccagtatacgggataaagcgctaaacttcaatacggattagcttgctctagcctagtatttaagctaaaatagaccagtaatcacgaatgacgaggagcttatgatggttaataaaaatgcaattattttagcagcgggtaaaggtactcgcatgaagtcaaaattatataaagtattacatgaggtttgtggtcgaccaatggtagatcatgttttaacccaagttgaaagaacgcacccaaccaatgtggtcacaattgttgggcacggcgctgaaaaggtgaaagattatctcggcgaccggtcacaatatgcattacaagctgaacaattagggactggccatgcggttttacaagctgaagctttactgaaagatgaagatggcattacgattgtggtcagtggcgatacgccacttttaaccgctgaaacctttgaaaaattatttgcataccatcatgataaaggcgcaaaggcaacgattttaacagcaacggccccagacccaacaggttacggccggattatccggaatgatatcgggattgtcgaaaaaatcgttgaacaaaaagatactaatgataaagaagcgactgttaatgaaattaatacgggcgtttattgctttgacaacaagaccttattccaagctttgcatgaagtgacgaataagaacgcacaaggtgaatactacttaacggatgtggttgaaatcttgaagaaaaaaggtgaaattgtcgctgcttacagaatgccaaactttgaagaatcaatgggtgttaatgatcgagttgctcttgctgcagcaacaaaagtgatgcgtaaacgcatcaatacagaacacatgcgtaatggtgtgacattaattgatccagaaaatacttatatcgaagtgggcgttcagattggtaatgatacaattgttgaacctaacgtcgtcttaaaagggaacacaacaattggttcagattgtttcgttggtgctggctcaactattattgattcaacaattgaagacaacattcaaatcacaagttcaacgattgaatcagctatcatgcacacggggtcaaacattgggcctaacagtcatttacgcccaaacgctgaaattggtgaagacgtccatgttgggaacttctgtgaagtgaagaatgctaaaattggcgatcgcacgaagattggccatttaagttatgttggcgatgccacattaggcactgatattaatgttggctgtggcgtagtctttgttaactatgatggcgtggctaaacaccacgcaaatgttggcagccatgtcttcatcggtagcaactcaaacattgtcgcaccggttgaaattgcagatcacaccttcattgcagctggctcaaccatcacggatgatgtcccagaaaaggcaatggccatcgcccgtgcccgtcaaacaaacaaagaaaactactgggcaaaactaccagtagcaaatgacgaagaatggcaatagagtgctggctgtggcggttagtaattgagcattaatacgatgttagattaagcggaaattacggtgacaagaagcacgttttggattaaagtgtgtttgtgacgattagcttagtgttgtaaagcacatcttaaaataaaaatcgtccgtaatcttatttttgagattacggacgatttttttgatacttgtagttattttaaagttgagaaataatcgcgtattaagaaggcgattagaaaagcgggccaaatccaaattgaaccacttgaaaataagattagaagaagtatgataagactcccaacagcggtggttgcccagcccatttttgtaatgcgataatttttaggattatagttcgggtgactggggtagaaaaaatgatactgataaatcaaaacggcaacgaatagaataagaccaagaataaaatagggcatgctgaggtgaaataagcgatcggaagtaataataattaccagaattaaaagatagagattattaaaaatagtgtatttaaggcgggtcatagtaacctcctttttcaattagtgtaccttgtcttgcgctaaatgacaatttaatccataatccaaaataaacaagcatttttggggatataatgggatactaaacgggaggttcgatggtaatcgctattaactttttctttttctctcacgtttctaatgaacagcgcttactttacaacatttgtgaactttttaagttttaatcttgatttccggggtgaaaatgcctaaactttaaataggtactaacataaattttttggaggctgacatgtctgaacaatatttcgaccctaagttgaaaatctttgctttgaactctaataagcccttagctgagaaaatcgcggctgaagttggggttcctttaggaaaatcttctgttaaacgttttagtgatggtgaaatccagattaatattgaagaaagtattcgtggcgacgaaattttcattattcaatcaacatctgcaccagttaatgataacttgatggaaatcatgattatgattgatgcattgcgtcgtgcatctgctaaaacaatcaatgttgtgttaccttattatggttacgcacgtcaagatcgtaaggctcgctcacgtgaaccgattaccgctaaattagtggctaatatgttaacgatggcaggggctaaccgaattttagcattagacttacatgccgtacaaatccaagggttcttcgatattccagtggatcacttgatgggtgctcctttattggctgattatttcttgagcaatgacttggctgaaaatgctgttgttgtttcacccgatcacggtggggttacacgtgctcgtaaattagctgatttcttaaagacaccaatcgcaattatcgacaaacgtcgcccaagaccgaatgtttctgaagtgatgaatattatcgggaatgttaacggtaaacgcgcaatcatcattgatgatatgattgatactgccggcacaattacgttagctgcgcaagcattgaaagatgctggtgcaacagaagtattcgcatgttgtacacatccagtattgtctggcccagctattcaacgaatcgaagattcagtgattaagcaaatgattgttacagattcaattaaccttccaaaagaaaaattaatcgataaaatggtacaagtttctgtcgggccacttattggggacgccatcaaacgaatccatgaaaacaaaccagtcagtccattatttgaaaacagatttaaaagataagcgtgctaactcgaacgggttagctttgaggaagcacatttcaataagctaacaattaaaaacgcctgaacaatttgttcaggcgttttttgtgactttatttttctttgttagctaataaatcgcgaatttcttttaagtaaacttcttctttcgtttcgactacttgtgcttcttcttcttcggtcttcttgcccatgtcacgaagcttgttgaatcctttgacgattaagaagacaacaaatgcgatgattaagaagttaatcacatcgtttaggaagttcccgattttgaaaacagccttggtgcctggaatggtaagcgcaataccggatagatcaacttgtccaacgaataatgaaatgattggattgattaagttctttgttaatgagtccacgatgctttttaaagcagcccccaaaataaccccgacagccatatctagcacattaccacgcataataaattctttaaattctttaatcatgaaaacgacctccattaatattattaattattgctacaaaaagtataccgtatttccagagcctataaaataaaaatgctgtgctagttacataattaaccaataaatttgttattttcatgaaaaatcgttaagatagtcacaggaattaaataacagaaattagagatagaggaaccttagatgaattggattgtacaattgtatcaaccattctttgaactgagtaattggcaaactgtcattacgtcgtccgaagattggcttttaattttaacgttagtgattatggaatgcttactctcagtagacaatgctgttgtattagcggcacagacacaaacattacctacaaaaattgagcaagaaaagtcattggtgtatggcttatggggcgcttatgttttccgcttcattattattggtgtcggcacctatttaattcatttgtgggaaattaaagttgccggttcattgtatttaatttacttagtcattgcttatttcagaaagagtgggcatccgaagcaggctaaaacaccggaggcgggttctaaaatcagtagtccgcatcggttctggcgcacagttgcttcgattgaattgatggacattgttttttcaattgattccgtattagcgtctttagcgatttctagtaatccggtgattgttttaattgggggaatgattgggattatctgcatgcgggggattgcccaactcatcgcccaattgatgaagaaaattccggaattaaatccgatggcttacatcttaattctcttcatcgcgattaaattattcttgtcgattccagccattgactatgaaattcctaacctagtgtttgctggaattgtgtttggcgttattctactgacgctcattattcattatgtccgtgcagcacgggctaaataggcatcataaaaaagccgttgtggacaaattgtccacaacggctttttacgttacatatgattgagtaaaacagttaaggctgcaaatgcgacacttgcaattgcgactaaaatgaattgatgctgtttcattttgagaattgcaatgaattcacggatgattgcatttggtaagaagtaacgcgatgttttagcgccaatgccatctgctttcaaacgggcttgctttgcaaaaagcccagcgcggaatgtgtggtaattattggttgcaagaataattttaggattcgttttagtggtatcagccattataatgtcttttgaaaattgcatgttttgtaaagtgttgactgatttttcctcggtgagggtgtctttaatcggaatcccttgctcaatggcgtaacgttgcatggcaactgattcaggcagcttctcatccggaccttggccgccagaaaagaccagttttggtgcagggcggccttttttgacttgtttatcataaaatcgaatggcgcgattaatccgactggccagtaacggtgggacgaattgaccatcgattaaaccgctacccaagacgatgatgtaatcttgttgataacgggggcggttgaattgatagataatcagtgaggttagatataaatagaagaacaatggaatatacaaaagaaaaaccgatacaatcgtgctgacaaataatttaacatcggcgggaatgtgtaacaagcgcgtgatgattgggatgaaaaatgagccaatgatggctaacgcaatgaggagggtcagcatgttggataacgtgtgactttcttttttccagacaatatacgcgttccacagcaacaagacaataccgaataagtagaagaacatgacgattagaacgacaacaattgcagcagcaattgcaatgttattcagcgtttcgttattgaggcgaatcacaatgagcgcagcatccattaatgcgctgaagaggaaaaagttaaacacaatgccgttgattaaccggcgtttttcaaatcgctgtaaaccaataaataaaatcaaaaagaaaaggggggacgcgtaaacgagatcaattaacgtagtcataataactccccttatgattaggcttgcctttcaaaggcgtatgtttcaatggcgtatgccacgccatcttggccttcatggttactcttagtaacaaccttagcaatttttttcaattcaggaatggcattatccatggcaactgggaagccggcgtattctagcatcgataaatcgttaccttgatcaccaatggccatcacttcagattgatcaatatttaaggcatttgctaaatcacgcaaaccatttcctttaccggcgttcttgttgagtacttcgaggaagtaggcttcactttgaacaaattgataacgatcgaaaaaatcagcaggaatcttggttttggcttcagctaagacggcgggttcgtcgattaacatcacttttgaaaaggccttgttaggtgcgatttcatcgacatggcggaaacgaacaggcatgttgacgagggcactttcaccgactgtataaggactgatatcgcgattggcggtgtagatgaattgatcgtcttcagcgtgtaaatgagaaccaatttggcgggagagggtttcaagttcaagatattggtcatgcgcaagagtgtgacgcactagaatttcaccagttgccgtattttgaaccaaagcaccgttgaacgtaatcacatagtcagtggcttcagttaaacccagttcttttagaaaaggcgtgaccccggtgagtggtcgcccagtacatagcacaactttaacgccatgttttttagcagctttgacaactttgattgttttagggctaaggatgttattttcatttaatagggtaccgtccatatcgacagcgacaagtttgattgacattataaaaactcctttttagtggttaggattgattgcaccgttacgcaagtatgctttgaactggcggtatattggtgcgaagacttcgatatcattttcgttgagcatttctttagggaaatagaagcgttcatcgccgctaaaacggcctgagatggcggctaccaagtcacttaatgatgataactcttcaagttgaccatcagattgtataatttcaatctgagttttgggtgatttagcggagggatcataggcgtcgtacggcaaatcgaaactgttattaacagcagtgtaatactcactgttataaccagcttgctcggttagcgcccgtaattctggtaaaacacgttgggtctgttggctaaaggcaaccgatttgagtgggcggcggcttaaaaagcggtcggccaaatcattgagcactgaatccggatagtctaaccagtatagaaaataggtattcaaaacgccatcatctaattttaaatagtcttgtaaggtgaagttctgttcgaaaaatggaatcaataattgcggtgcgagactctgatgatggtcaggctgttgataaagaaatttcgcacgttgcaagagcttttgcaagataacttccatgccgcgtgaaacaggatgaaaataaacttgttgatacatctggaaccgactgacgatgtaatcttcaacggcgtgcatcccgtttgctaaaaaggcaatgcccttatcgtaaggccgcatgactcgtaaaacacgcgtcaaatcgaattctccgtatttagtcccagtattgtaagcatcccgtaataagtaatccatgcgatcagcatcaatctggctggaaatcatctggacaacttgtggattcggataagaatgatcgattacactagcgactttcgcagggaaatcatccgcaacttgggttaagacgcgattaatggctgtctccgggttggtgataatttggcgcgtaatcaattcatgatcagtattgaagatgtgttcgaaggtatgtgaataagcgccatggccgatgtcgtgcaataaagctgcacataaggcgactaaccgttcatcatcgttccaaagtccatcaccggcaacttgactagggtagttaagttggaattgatcacagatttggcgtgtgatttcataaacacctaatgagtgggtgaagcgggaatgttcagcgccttggaaaacagaggaagtcgtgccaagctgtttaatccgccgaagacgttgaaattcgggggtgtcaattaaatcgagaatcacttgatactcgacgcgaatgtagttatgcacaggatcacggaatactttttcacgcgatagtttaatagcggtgttagtcacaatataatctcctttttgaggcccgttaaacttgataacggtggagtgctgtttgttttttaagtagtagttgttgataagatttcgtttgtaattgtggtgtgaggtcaactagttgtggttgttgaaccaaccggctaaaagcggtctgtaggtgcgtaatggctgttgcaacagtcattggttcgtttaacagatcagataggttggccatggtgtccgggatgaccgctgggaaagtccaccgcgtttggctttgtgcttggccagcagtgtaaaaactgtgcatgagtttgccacgcgcctgttgattgcctgtaatgctggcatataagagtacggcaattccgtttttggcacggcgttgggcaataccggcaaatttttgaccattgatgctgagatcgtattcgccagggcaataggagtgagtgacttcgaaatggtcaatcgtgacgggatagtctgcaaaggcagttgtgaacaattggtgcatgagcgcgtaagcggcattaatgcttaggtgatccgccatatcaggaagatagaagctgacgttcaaaacgccggcatccgtcacaatccccaaaccaccagcgttacgcacgaaatgggcatagtgtgcagcctctaatgtggcaaccgcttgtggataagcaggtaactttgtatccatcatgcccaaaataacattgtcagcaagcgtccaaaaatgaataataggttgctgtaattcgcggctcaaagctaagaggctattagcatgagcaaaagcgagtggtccagccgctttttcaaaatgttgggttaaaatagcccattcttgattggcagataaagtcgctaaatcatccatggtaatcacctccgaaaattaaaaactcttcttaattatagcgtaaattctaggcgctgtctgcaatcggtacgttggtcaaagagaattggcggattattctggcgctcaaattttgaatggcttataatggaactacttaattaaaattaaaggaagttatttatggcaagtcaaagcggaattccggtcaaggtacaccttgaaacgcaaattcaacaagatgggcaacttgaaaaacacgttttcgatgaggatggtcaagttgtcaaaatgggagagtccctttacttacgttatctggaacacggtggtgaacaagccaccgcggtacggtttaaattggctgctgacggtcaaattcaattaacgcggggcacagaagaagacgagacgcaattgcggttgtactttaagcaaggtgaagacctcggatcaatttaccaaacaaaatatggcaacatgccagtgctcacaacgacaacccatttattatcgatggtgaaggaacaaccgttatcaggtgaaattacggttcattaccaacttgccatcaataatcaagccgtgggggattacaaattacgattgatttttacagcttaagctagtatgattaaggatagactgttgaaaggacgtgtactggttgaaattagacgtttttaaaggccaaaataaagaagaactatcaatgattgaagtcgcacatgcaattttagaagaaaaaggcgacacgattgcattcgctgacttaacgaatgaaattcaaaactatttaggcaaaagtgatgaagaagtgcgtgcacgcttatcacaattttatacggatttaaatgaagatggtagtttcatttctttaggcgaaaacgtttggggcctccgttcttggtacccatatgaatctgtcgatgaagaagttaaccatccagaagatgaagaagaccaaccaactaagaagaaacgtcgtaagaaggttaacgcattcttagcagatgttaccgacgatgacgatgtgattgattacagtgacgatgatccagaagacgaagacttagatgctgatgatgatgttgatttagcagctacagatgacgttgctggtgatgacttaactgaatacaaagctgacttacaaaacatcggtgacgatgacgatgatgaagacgatgatgccttagaagatggtatcgaaggtcaattatctgaatttagcgatgatgatgaagacgacgaagacgaagatgacgaactttaattagacgtttccaattcgttgccataaaaaaagacgccaaagttaactttggcgtcttttttttgcgtgtaatattttttaagctaatcctcgtcggatacccgatttacgacacactctcgttcaagaaaatggtaaaccgcgccgattaagttggcgtcttggttgaagtgacaaatttcgatgtgtggcacaggaataggggtggttgcccctgcacggcgttgccagtaacgattaatactactattgtcatcggctaaaagtgcgtcaatcgcagcgtttaattttggtagtaggtcagttcgctgactaatgccaccaccgacaccaataatctcgggcgtgtaagcaacgtttaaaaagagcatgatttccgcaagggcagcatacatctgtgtgacttcttgggtggcaatcggatccccttgatcggcaagttcgaagacggttttgccatcgattgtattggggagtttaaaattacggagggagacagtcttgccaatttggacgggtgagacttttgaattgttgagtgttttaatggcatctgcgatgaatttttcgaagttatcgattttatcagcagtggttttgagaatggtcccattttcgataatggataagccaatcccagaaccaattattgtgaataaggcgctcagatgaccttgaccaatcccagctgtcatctcggcgagtgctgcactgtcggcatcattttggagagagacgggcagaccaaggcgcgttgcaaattcagtttgaaattcaccgaggtgcaaaaatggcacataactcatgccatggatgatgccagtctgttcatctggatcaccaggacaactcaccgcaattccagttaaatgaaagtcggtcgcaaattgattacgtaattgttcaacttcggaatagaagcgattgcgtgttagcggtgtagggaattgcgcttggttaattagttggtgtttcgtccaaatcccatatttgacggcagaaccgccgatatctagagctagtaacgcgtcttgtagcatggtgggccatcctttcaaagtaggtcatgcaaatagtgtagcataggcgatttaaaatcggcgcagaaatgactaatttttttgcttgacgctaattgccatttcttgtattatattctttgggcgctttgcagttactttaattgcgaagccagaatcggttaacaggctccctgttcattttgaatagggagcttgtttttgtttttggttgtttcccaaaagcatgaatgtttagcgtaatgctaagaagaaaaggagaatatttatatgaccaaatatgtttttgtaacaggtggcgttgtttcttcacttggtaaaggaattgttgcggcttcacttggtcgtttgttaaagaatcgtggattaaaggtaacgattcaaaaattcgatccatacatcaacgtggatcccggtacaatgagtccttaccaacatggtgaagttttcgtaacagatgatggtactgaaactgatttagatcttggccattacgaacgttttatcgataataatttaaataaatattctaacgtgacgacaggtaaaatttattcagaagttttacgtaaagaacgtaaaggtgaataccttggcgcaactgttcaagtcattccacacatcacaaacatgattaaagaaaaaatcatgcgtgctgctacaacgactgattcagatatcgtgattactgaaatcggtgggactgttggtgatattgaatcactaccattcttagaagcacttcgtcaaatgaaggcggatgttggcgcagaaaactgcatctacattcatacgacattagtcccttacttgaaggctgccggtgaaatgaagaccaaaccaacacaacacagtgttaaagaattacggagcatcgggattcaaccaaacgtcttggtttgtcggactgaaaaaccaattcctgatgacatgcggaacaagattgcccaattctgtgacgttgaaccagaagccgttgttgaatcacgcgatgctgaatcaatctacgatattccattgttattgaagaaccaaggcttagatgattttgtcttgaaccacttcaagatgacagcaccagaagctgacatgacagaatggattgatatgttacacacaatcaagaacctcgaaggcacgaagaagattgccttggttggtaaatatatcgaattgcaagatgcttacatttcagtgaacgaagcattacgccatgccggttatgcttataacaccgatgttaaagtgacaccaatccaatcagaagatattacgcaagaaaatgttgctgaaacattagctggctttgatgggattatcgtccctggtggtttcggtgatcgtggtttagaagggatgatcctttcaattcaatatgcgcgtgaaaatgatgtaccatatcttggtatttgtttagggatgcaaatggcaagtatcgaatttgcccgcaatgttgctggcattacagatgcaacaactggcgaagtacacccagaagcaaaacataaattaatcgacatcatgtcagatcaaaaagatttagaaaacatgggtgggacacaacgtcttggtttatacccatgtaaattaaaaccaggtacaaagactgctgctgcttatgataaccaaagtgttatccaacaacgtcaccgtcaccgttatgaattcaataacgaatatcgtgaattgttgacagacaaaggcttagtctttgccgggacttcacctgacaaccgtttagttgaagtgatcgaaattccagaaaacaaattcttcgtggcagctcaatatcacccagaattcctatcacgcccaaacaaaccagaaggcttgttcaaggcatttattggcgcaacaatgtagagtgctgactcgaacgggttggctttgaggattagccacatcaggcggattatcgacaaggtcggtagtatgactgatgtggctaaccggaatatggagcacgtctcataaaagacgctactagtcagcacgacaaagtagcgtctttttgtatgccgaaaaatagttgtgaaaatggagatgatccgttttgaaaagccttacatttttagacttctacagcccaattgaatgcgatgattagcttttactaagtatgaaaattaaaaagtaaatgttatccctaaatgccttgtaatttatgtgctgattaattattattatacatgtatgactaattatcaacggcattgagtagattggagccgttttccaattttaaaaaataaaactaaaaaattaaaaaacttaaaaatatcaaaagcgccttctggtttaaaccacaggagaagtgggaaactgaaggcggttcttttgttgcagagcgaacggggaaatctaaaaatgaaaaaaatgttaattcaaggtggcaatctcttatctggagaggtcacaattggcggtgcaaagaatagcacggttgcgattattcccgctgctattttggcggagtcgaaagtcattttagactgtgtgccgcacattaaagacgtcaacagcctactatccattctagaagatatgtctgtctcatctacttttgctgatgacacggttgaaattgatccaacccacattatttcgacaccacttccaagcgggaagattcaaagtttacgcgcctcatattatttcatgggggctttattaggtcgttttggggaagcaatcgttgggcttccaggtggcgatgatattggtccacgaccaattgatcaacatattaaagggtttgaagcacttggtgcgacagtgactaataaccacggtgctatccaaattaaggcaccaaacggcttacacggtgctaaaatttatcttgatatggcatcagttggcgcaacgattaatttattattagccgctgtccgtgctgaaggacaaactgtcattgaaaatgcagcacgcgaacccgaaattgtggatatcgcgacattcttgaacaatatgggtgctaagatccgcggtgctgggactgacattatccgcattgatggggttgaacatctgtatgggcgcaatacacacaccattattcccgatcggattgaagcgggaacttatttaagtatggctgcagccatcggggatggcgtgaacgtcaagaacatcatcagtgaacacatggacgcttacctcgctaagttagaggaaatgggcgttaagatggatgttaaggaagatagtatcttcgtttatccatcacctaatttaaaaatggttcaaattaaaactatgccatatcctggatttgcaacggatttgcaacaaccactaacgccgctcttattaaaagcgcaaggtgaaggcattgtggttgataccctttatcctaaacgaacacgccacgtcccagaattaattcggatgggtgcagatatctcaatcgaaaatgatgtgattattttacatcatgccgacaagttacaaggtgccgaagtatccgccgatgaaattcggggcggtgcttgtttaatgatcgctggcttaatggccaatggtgtgacaacgattgataacgcaagtaatattttgcggggctatgaccgcgttgttgataaactaacgggtctgggcgcaatcgtcaaaatggttgaagaataagttaaccatctattgttttttgttagcattcatgctaatatttaatggttatgtaaacaaatatctctgacatagcaaatatctcagggcaagacttaagttgtgcatctgaattgatgcagataactttagcaaaaaggagcggaaaagacatgaaacaaggtattcatccagattatcacaaggtagtatttatggattcatcaactggcttcaagttcatctcaggttcaactgctaactcagctgaaactgttgaatgggaagacggtaacacatatccattaatccgtgttgaaatttcatcagattcacatccattctacacaggtaaacaaaagtttactcaagcagatggtcgtgtcgatcgtttcaacaaaaaatatggttttgcagacaagaacgctgccaaataattattttgaaaccggggaatttttccctggtttttttttgcctttttttccataaaaatagccaattgcaaacggcaatcagctatttaatcaacattttttgaattcgatgactagcgagacacgctagcaaaatgactgggaaaaattgaatcgggaaaagaaagagtaacaaagtagcagtgacgtacggttgtgccacaatcaccgtacaactgacagcgacaaccgtggcaaccaggaggccgggagtgtatggcaacacaacggcgagacttaaaccgattgccgcacttgcaaaaatggctgggaaaattttaccgccccgccaaccaaaggcaaatagcagattggttagaacggtttttccaagtccgattaagagtaaataaatgaatgattgatctaaaccggatttggtaaaggtgaacaagtagtgttctccagaaaagagtaaataaggcgacaatagaccacaagcacccaagaacacaccagcgatcattgcaagtaagaccggccgctgaatcgtatcaaagagccactggcaccattgttctatttttaagaatagattgccaaaaactcaaccgacaattaatgctaaaataagaagtggccaaaccattaatgtccaatgaatgattggtgtgtgcagtgtaaatggactttctttggggaagagttggttgaccaaggcgaaaccaagaatcccagtggcggttgtgagaatgtataatagaacttgattgaagtgtgatttgaaatgatcgcgcaaggaggtcgtctcaatcgcctcaccaacaccggctagtggtgcgtggaagatggccgctagcatggcaccaatccccatcgtcaaaaacgtttctttttgctgagcggttagtttaagtcgatcgcccaaccaagtgattagaccgccgacgatggtcgagagcgcggcttcagggccaaggctagcgccgcaggctaatacaactaaggtggcgataatgtttttaccgacttgctgttggtaggcaacggacccggtttgtttaaattcgctgagtgtttcatgcattgttttaggataaggcccccaataacgttgcattaagccgacgagtaatccgccaaatagaccaacaagcaacggataaaatggctggttgaaatgcgaataaccgacttgccaaattaagtgtgtactgaaattaatgagggctaaaaaggcggccgctatgccaccaatcaacaatcctaaaagtaagctatataaaacaaaaataattttaaactgcgtggttttagtggtaggtgatgacatagagcctcctagttaagggaattatttatgaactattatgcactacccacgctagtttgaccatagtcgaattgtgagggaaagaataatgaaaatcgatcgattacaagcatttagcgatggcgtttttgccattttattaacactattagtgttagactttaaagtgccggactatcaagcagggcatttgagtcaagcggtgattgcacagtggccaactttggctgcctatgtactatcctttttttatgtggggacattatggttgtttcatcacgattattttgcgaaaataaaacaagctaactggcagttaaacgtgatcaatctcagtattttatttgcagtgacactgattaattacccaactagtttgttgtcggaatcgattgctcaacaaaatggcgctgatattcgatttgcttttacatcgtatgcgattgttgcattagtcatctcagctttgttttgggtattatatcggtatatggcactgcatcatgaactaatgcgtcagtatgaacagcgacacgaggaattttatcaaacgattaaaaatgatcccttacgaagtgtcttgatttacgccattgccattgtcggaattcagattaatagctggctaggggcactgttgattttgctgggcaatatctttcatttcatcgcatacttgcgacttagtcggagtgtcacgctgtatcatttgaatggaaaggatgaataacatggcaaaacaaaaaacaaattggcggtgggtagattggctttatgtcttcaccattgtgagtcaattaatctatattggttattacttagaacaaatgctgactaaccccaaagacaacggaacattgtcttttgccgttttacaagtggttgcaggcctggtgattgcgaccttacctattatcattgaacgctttatgccataccggtttccagagattctatatgcagtttatttaatctttgtatactgttcgattttattggggacgggattacatttttatagtcgcttatactactgggataaattcttgcatgtcttgagtgccgggttattggcgggcttagggtatacggtctttaacgtattgatttcaaaacaactccgtcaaaccatttcagccttactcatgagtttgtttgcggccacgtttgggagtacgattggtgtgttgtgggaattctatgaatttaccggcgatagtttgttaggcttaaacatgcaacgttatatggcaaaaggtcaccttttattaggccaagcagccttgttagacacgatgggggacttactagcggatgtcttgggatcatgtttaatcgccattatcggctatttctgtattaaacataaccgggactggttagataaactgacgtttaccaaaaaatagagtgcgtttgtggcgcttatattttgagcattaactggatttgacgaattggcgattgtaatcaccgatttggcaaattctgttaagcgcagaaatatgccacaaaaagcacgtttcaacaaaaaagtggtgtcgctctgaaaatgagcgacaccacttttttgtattatttttgtatttcatgttcttcgcgtaagacttttgtattctgacgcacccagaagaggttgacgattactaaaacggttgtcgataggaaaaccccgctgtaaccgaataggccagaaacgctggaaccaattaaaggtccggcgacattccccattgcttggaaggattggttataactgaaaatccgcccggcggaactatggggtgagtacttcgcaagaatcgtttgaacttgcggtaacaatgcggcatcggcgaccccaaccagcagacgcagggcaccgagttgccaaacattttgaacgaaagcttgcggaacgtaaacgaagacggcgaagatcaagccaccgagtaaaattttctcggaaccgatccgatcgccaagtgcaccaaaacgcggcgcggcaattaaggttgcgatccctggagtagccgcgacaactccgctgactaacgctacgttattgccatgatgcattaattgacggacatataaactcaacagcgggctaattgagttgttggaggcttgaataatcattgtggtgacgaacatgccgataattaaatgcgggtatttcaattcatgaatcagttgccgaccgggtacttgatcgcctttttctactggcgtgaagtcttcgtgaacgaaaaccagacagaggataaagacgatgaacaagatggtaccggtaatgaagaaggttgttcgatagccggttgcttgggcgataatcccacccaacaacgggcctaataaggttccggaaacacttccggtggtcagggtgcctaaagcttgaccacttttttcttgtggtgctgaagtggcaattaaggcgtttgaattactgatataacccgagaagaagccttgtaatagtcgcaaaccaattaattcataaatattttggactaagcccatcgcacccaggacaatcgctagtcctaatgaggcgcggagtaacattaatttgcgaccacggcggtcagcaattttgccccaccatggtgaaatcagagcggtaaccaagaaggtaatagaataggtcaccccactccataaactcagttgggccgttgtaaagttgccaagtgtgtcaatgtataacgacataaatggcataatcaaactaaaagcaaccccggccatgaaattaccaaaccataaaacgacgaggttctgttcccattgtgcgcggcgtctgaataaacgttgacgaatgttagtcaacatggtgtcatcatctcgattctaaaaagttaaagcggcgaccacgcttgctgatgtgcgtggtaggcgtcttttaagtgtgggagttgttcaaagagggcagtcagttgcgcatctttagctcgtggcagctggcgtttaaagtacaaccgctgagtgtcgtaggcagtcaatgcgcttgcttgttgggctggtgtaccgtgttcggcaaaatagagtagccaatcaaacagccattctttatcagcatcggcttcataacgggctagcaaagtgtctagctgtgctccctgtgccactaacaagtaatggttacgctgcaaaggggttaactcattatctggatttagatcaattactttgggacctaattgttcgagaaaactatccagcgaatcagcaacggttaaccattgatcgacctcagtatctatgtagcgaatcggtggttcagctgaggcttgttggcaatcaaatacaaagtactgctgttgatgctgactaaaagggactaagtaatcgggcaagtcgggggcttggatgactgcttcaccgttgtgagcaatcccagctaaataatgacactcaacgtcggcgagaccatcacttgttggctcactcgtaggaaggctaaagttagtcaaaaaaccgccattggttgtttgacaaagtgcctgataactcatgggaatccgagggtcatcgacaatcatccgtggtgcagttaaatcaacattcgcaattgctggctgtgcagtaaacatgcaagtatccctcccaaaattggtaactctttaattttaccatttatgtcaaaccaaggttttgttaaggttggcaacctattctttatttgttgtagcgagtctgataatatgaagacaacattaaagaaaagaggatacgcgtatgttgtggtttattattatcattattttgttagtggttggcgcggttggcttctatatcagcacctacaataacatggtcaagagtcggaactggacagatgaagcatggagccaaatcgatgtacaactcaaacggcggaatgacttgattccaaacttagtatcgaccgtgaaaggttatgctaagcatgaacaagacacgttggaaaaagtcatcaagatgcggaatcaattggttgaaatgccagctgataatcggcaagcaacaatggcggcttcgaatcaattaacggattcattgaagagcattttcgccttgtcagaaagctatccagatttaaaagcggacgcagaatttacgaagttaatggaagaattgacgaatacggaaaataaaattgcgtatgcacgtcaattgtttaactcaagtgcaacccgttacaacaaccaaattcaaactttccctggtaatattttggcaggtgctcacaatttccaaaagacagcttacttagaaacgccagttgaggaaaaagcagcacctaaagtttcctttgaatagggtgtgattgggaatgttatttgaacaaattcaacagaacaaacgtaaaacggtatatgtgatgattggcttttttgctttagtattggcaattggtgctgcattagggtatctgtttatgcgtaatttgattagtggtgtcgtggtggcggctattttagccgccgtttatatggcgatgatgattggaaactcaaccaacgttgttatgcagatgaatcatgcgaccgaagtccatgatgctagcgaatatcctgatttatggcacattgttgaagacatggcgatggtcgcccaagtaccggtgccacgggttttcattgttgacgatcctagcccaaacgcgtttgcaacgggcaatgatccacaacatgctgcagtggcagttacgactggcatcatggcgcgtttgaatcgggaggaacttgagggggtaattgctcacgaagtctcccatattcgcaattacgatattcggttacaaacgattgccttggcactttctgcggtgatttcaatgctcgtgaacatcggcagcaacatgttatggtggggcggcggccgcagtcgtgataacgaccgtgaagaaggtgcaagtaatatcatcggtttggttttttcgatcctattgttgatattgggacctttggcggctagtattgcacagatggcgttgtcgcgaaatcgggaatacttggctgatgcatctggtgtcgaattaacgcggaacccacaaggtttgatcaatgcgttattgaagatttctgacagtgagccaatgcaagctgcggatccatcaagcgcagctttgtatatctcagatccatttaaaggacttagtcggtcgggtgctcatttatttgatagtcatccaccgattgaagaacgagtcgctaaattaagagcgatgtaatgttttaaagacataacgcatcagctgtaggtaatagttgatagaacacgttttatatagagggaggcaaaattcatttttgtccccctctttttttgtataataaaggaaaagaggagtgatcagtgtgcgattatccccaatccagcaattaatggcgttacaatctgctctaataatgcaattgaatgagacaccgagcaaacagattaccatgattgatttaccggttgtgcgtgggcaattattattggcattgcatgcgcgtcaccagctaacattatcgacgcaacaacgcacaatgattcaacgcgccatcatcacaacgttggcaactaaaacggatggcactcaattaatggatctttggcggcaaacactaccgcagcggtatcggattgttgatcaggcagaggtggtggcccactttgagcagttagaacgcgctaattgggatgttgcgagtttacgcgcttacgcaacccatttaacgggacaacttgctgcgcaaccaacagcgcttaaaaggatcttgcaacacaattggcaagcattacatcaagtaggctcagcactttatcaaatgctttttgaagcatatggggaccgaactgcacaaccagtaattaattaccaacggatcaatttagtgctcacgcatttaggggcgcagttggatgagcatgcgtttttgcaattgacagcacgtgattatcaacttgacccgcaattagcaccagatgcgccttttttagcaacctttgcgcaaagtgtgcaacgtgcatttgtcggtcgagttttaaccgataaacggattcatcaattcagaatgtatttagatcggcagaatctacgctatatccgccattattttcaacactctggtgaaacagatgaacaagccttagcgcggtttgtgcgaaaacgacaagcgacccagccacattattggctgcggcgtgaaccagctcggctccataataaataccgcaacggacagcgcccaacaacgcattggaatcgaaaacgactcacgccggattttcatagtgaatttattctagcaccatctggagcatttatcagtcaatggcaagtgcttaaattaaaggctgatggtctgattgatagtaatcctgaccattaccagctagatgatggcacactccggcaactactaaacggtgaatcgtttaattatgctaatcggaatgatcggcaacacgcccggttagatagccaaccaccgctgcaaaatgatcatgcactacgcaaaacagcttttaaagggtggcggagtccgactaagcaacaatatcgaccaaatgataaacaggttgatgactattcacggtggtactcttaattggtggtcaatcatttttggggcttttttgaaactatggtacaatattgcgtagtattttaagccataactaaaaaaagcgtgcgtaaaaatgcacacagagtaataggagttattgagatatgaaaatgcagttgggtgaaattgcacgagtcactggggctaaaaacgatattgaacaatgggcaaccattgaagtgacgaatgttgcgtttgacacacgtcaattaaatgcgggcgctttgtttgtaccgttagctggtatgcgtgatggtcacgactttgttggacaagctaaggaaaatggggcagtggcaactttttgggctgccaatcatgatgcacagccaactgattttcctgtattagtggttacagacccactagcggcttatcagaagttagccatgcattatctccaaaaaattaatcccaaagtggttgcgattaccggtagtaatggtaaaacaacgacgaaagatatgacagctgctgttttaggtagtcagtacaatatgcacaagacacaagctaactttaataatgaaattggtgtgccacaaacgattttatcgatggaagctaatactgaaattttagtgattgagatggggatggatcgcccaggtcaattaaaagcgctcagtgaattagccatgccagatgtcgcagtcattacgatgatcggggaagcccatatcgaatttttcaagacgcgtgataagattgccgatgctaagatggaaatcacagatgggctcaaagaagatggtctattaatttacgctggcgacgaaccgctattgactgaacgggttggcgaactcacaaccgagacattcggtaatttgacgaccaatgacttatatcccttacaagtccgtgcaggtgaaactgaaacgtcattcaagttgaatgcttggccagagatgacgtttacgattccaatgatgggtgcttataatgtcaataatgcgttggtcgcaattttggttgggcaacggttccatattaaaccagaattaatgaaaaaagccttggcgaattttgaagtcacaagtaatcggacagagtggcttgttggtcaaaagggtgaacggatgttgagtgatgtttacaattcaaacccaacggctgccaaagaagttttacacaatttcagccattttgagactgacgggcggcggattgccgtcttaggcgacatgttggaacttggtactgccagcaagaaattacacgaaagtttggcccaagaattagatcccacgatgattcaagaggtcttcttgttcggggatgaaattgaaccattatatgtgacgttaaaagagcgttatgcaccagaacgcctccattactttaaccgccatgaacaaacgcaattaattgctggcttgcaagcgcaggtacaacctgacgatttaatcgttttaaaggcaagtcatggcttacatttagaaaaagtagtcgctgctttacaagatactgaagttaattaatgattagcaattgacagacaactgcacaggcacgctgtttagcgattgaagctatggaattagattaacaattggagcaattccgtttgctaattaagttgtggcatgataagctattaaggagcttttttaatgaaaaaggcttttgaaaacaattatattacaagacagatttttgaaaatggtgcaattgacgaagtggacctgttttgtaatggcatgttttttacaaaacaaggaggaacactatttgaaattcgcagaattaggtttatcagaaccaattatgaaagccatcgaacgcgctggctttgaagaagcaacacccatccaaggcgaaacaatcccattggcattagctggtaaggatgttatcggtcaagcacaaactggtaccggtaagacagccgcttttggtttaccaatcttacaaaacttagacttagacaatcctaacattcaagcattgatcatttcaccaacgcgtgaattggcaatccaaacacaagaagaactctatcgcttaggtcgcgaccgtaaagcgaaagtacaagttgtatacggcggggctgacattcgtcgccaaatccgctcattaaaagatcacccacaaattcttgttgggacaccgggtcgtttattggatcatatcaaccgtcgcacagttaaattagaccacgtgaaaacattggtcttagatgaagctgacgaaatgttagacatgggcttcgttgatgatatcgaaagcatcatcaaacaagtgccagaccaacgtcaaacacttttattctcagcaacattaccagcaccaatcatgaaaatcggtaagagcttcatgactaaccctgaaatgatcaaagtgaagtcaaaagaattaacggctgacttaattgatcaatactatgtgcgggcaaaggacttcgaaaaattcgacattatgacgcgtttattcgatgttcaatcacctgaattaacattaatctttggtcggacaaaacggcgtgttgatgaattaacacgcggtttgaaggctcgtggttacaatgctgaagggattcacggtgatttatcacaacaaaaacggatgagcgtcttgaaatcatttaaggctggccgtttagatatcttagtggcaacagacgttgctgctcgtggtcttgatatctcaggtgtgacccatgtttataactacgatattcctcaagatcctgatagttatgttcaccggattggccggacaggtcgtgccggtaagtcaggcgtttcagttacttttgtaacaccaaacgaaatggaatacttacacatcatcgaaaacttaacgaagaaacggatgttaccattacaaccacctacagaaaaagaagccttcaagggccaattagctgcagcggttgcagacatcaactcaatgattgaaaaaggccaattggctaaattcagtgaagaagctgaagaattattgaaacaattctctgacgttgaattagcttcagtgcttttgaagacaatcagcaaggaatcagttcctgttaagataacaccagaacgtccattgccttcacgtaaaaaaggtggcaatcgtagcggcaaccggaatggcggcggcaatcgtcgtggcggtaacggtggcggctatcgcggtggcaatcgtcgtggtaatgacaacaaagacggtcgtcgcaacagtggcaacggcgatagcagcaaacgtcgtagcaatgacaatcgtgacaaccgtaagaagactgatggccgttcaaaacggaacttcacaattcgtacaaacgataaataagactttttaaaaacagcgggcggccaacttggtcggccgctgttttcatatagtcaattgtgacagagatgtaagttcagtctctgtcttttttgtggtaaactaattaaaaatagggtactaggggcgaagacgatgattgctggattaggcattgatttagccgaaattgatcgatttgaaaaagcacagagtaagaatagtcattttgctgaaaaagtattaacagctaaggaatatgaactgtttaaacggtatacggggcgccgtgcgttagaatttttagcggggcgctttgcagtgaaggaagcttttagtaaagcttatgggactggtattggacaggtacaactgcaagcgattgaaacgttaaatgatgcaaagggcaaaccctacatcaaacaagatttatttgagggaactgtccacgtatcactttcgcatacaacgacgttagtgatggcagaagttattttggaaagaggttgagacgatgacagtcggctacttacgaccaacacgcattctagttgatcaaaacgcaatttatgaaaatattcaaaatgaactaaaggatttaaaaggcacagatgcagtgattttccctgtcttaaaagcaaatgcttatgggcatggcatgattcctgttgcagaagcggcccaagcggctggtgctgcaggattttgtgtggctattttagatgaggccttagctttacggcgtgctaactttacggaacccattttggtgctagggattacacagcccaccgaaatcgaattggtgattgccaaccaaatctccattacggtcggctcactcgaatggttgcaagctgcttacgaaattgcccaacaaataccttatccacaaccaatgcacattcatttgagtgtggatagtggtatggggcgaattggttttagaaatgcgactgaattactagcagcagccacatttatcaaagcacatgcgaaatattttgatttagaagggatttttacccatttcgcaactgcggatgatcccgatgatacttattttaaagaacaaagtgcccggtttaatgaactagtagccgtgttaccagaatgtccacgatttgtgcatgtttcgaattcagccacgagtttatggcactcagcttgcaatgagaatttaattcgaatgggaattagtatgtacggattgaatccttcagggaatgcgattcctgaattgccttatgcattgaaaccggcgctaagtcttgaatcagaattggtctttgttaagcaagttgaagccggaagtaagattggttacggtgcgacttatgaagcgagtgaatctgaatggattgggacgattccaatcggttacgccgatggttggtctagacggatgcaaggctcaaccgttttggtggatggacatcggtgtgaaattgtcggtcggatctgcatggatcaattgatgattcggttacctaagcaatatccagtggggaccaaagtagtttttgttggtaaaagtggtgatgacgaaattactttacaagagatcgcagattatgcagggacgattcactatgaaattatctgtggtttatctgatcggttaccacgggtttacagtggaattgatgaacattaaggattaagaatttgattatcgccagttctgtggtaggatgaataaaggttaaagtgttgattcggaggttgatgcagatgaaagctaaccgtgaacaactatccgttaaattagacgttgagttggtccaagcaattaagcagtattgtgaggtgtatgcccttgatgagagtgatttgattcaagatgcgcttcacgaattcatggcgaccagacagtcaaaagtagataacgtcattaacgggtacgctgagatggctagcatcaacagtcaaattgcggctgaatttaacgcttgcgaaagtgaggcgtacgcacacattcgcgtagttgattgatcctaattggagggagaacaagtgggagaattaatacagcgtggcgatattttttatgcggatttatcaccagtggtcggttcagaacaagggggcatgcgtcctgttttaatcattcaaaatgatgtgggtaatcaccatagtccaaccgtaatcgttgccgcgattacagcaaagattcaaaaaccgaaattaccaacacacgttgggattacggccaaggataatggtgtcgaacgcgactccgtgattttattagaacaggtacgaacgattgataaacaacgcttgaaagatcgcgtcacacatttagtggcggataagatggcacaagtcgatcgggcgctcaccattagtgttggacttaaagcggtcttaaatccttaatacataaataccaaaaagaaagaatgaagagaacccgcttataaaagcgggttctcttttttttgacctttatcaacagccggtaaatatgatatgatggtagctgttcgaaaaaacgtggttcgtaaccatcccacgcaaaaaaactaggaggattcaaagatgacgaatcaaagtcgattaaaaacggtgattctaaacgggttagtggcagcattatacgttgttttatcgttattcccaggtatgttgggatttgcttcaggagccattcaatttagaatttcggaaggcttaaaccatttagtggtcttcaataagaaatatctatggggtgttttcggtggggtattagtgttcaatttctttttcagttctgaaaacaagttactcgatacgctttttggtggcgggcaaactttattggcgctgcttgtattaacgcttgtgatgccctatttaaaacaaacttggcaaaaaatggtggtcaatattctcttgttcaccgtttcgatgtgtatgattgcgtggatgattgtgttaaccggttctactgctagcacacacattccattctggccaacgtatatttcgttggcactttcagaagcagtcatcatggtgattaccgcaccagtaatgtatgctgtggataaagttgtgcactttgatgcacaaatgaaatcataaagattaaaaagggcagtcctaattaggactgcccttttttgcgttaaactaaatcatcaagtttggagtcatcacggagcgccttatcagattgtaaatcatcgatttcaggaacacgatagccttttttctcgagcttataaacaatctttttcaaaatctcaagatcaagtccagcaggcaaggtgaaaagggtgcgtcgtacgaattcatcttgcttagcatctaaggtgatgcagctggcgattgaggtatatttagcgataatcttcgacatggcaaccaaatcaccttgttcaccagaagaaagcacagtgagtacatagctacttaattcgagattccacgcttcagaaagcatatttaataacgtgctatgcgtgagaattccgtaaaaattgctatcttcgtctaatacggcgatgtatggcaaatctttaatgttgaagaatactttgaaaaacggtgcgtcaactggaatatacttggtcatattcttcaataagctggtcacgggaagctgcatatcgcccccttgagacttatgacggtagatgtgcatcttatagatgttaccgcggaagatcttgccgctagcatctaggacgggcacacaacggtaaccagactcttctagtagctgtaatgcttcttctaaggtcaccgattcaacaattgtggtgagacgttctttaggtaaaactagggatttaatgagcataggctttctccttagattaaaattctctcatatactaatgtaatcatagcataccaccaagcagattaaaataactagtttttcgactcagcgaaaacttgattagtaatcgatgagaaagaacgtgaaatctaagcaataaaaaagcagggataaaagttaattttattcctactttgtatttaatcgttgagcttactttttctaaacgaattctgtaggtcagctacctctggttaatccgtagaggagaggtgttgctagtacactacgtctaaatcactacaactggaatgccttcgctaacagtatcgtagagtttagccattgtgccaggtggggtattgatacagccgtgtgagccgtgttctttataccagtcaccaccgtacttaggttgccatggcgaatcatgaatcccaacgccagtttcatcgattggcatccagtaattaactgggcttgcgtattcgctgaccccatcaaagttcttccccttcaatgtggcattgcgttctttcttccaaacgctccaaacaccggttggggtgacttgtggtggacgtgctgaaacgatatcagtgtcaattgtgaccttaccatcttgatagagccacatatgttgggcttttaaatcaatttcgatgtaggttgaaccgacactacgcgttttctgatcagttccggaaccacggataacagctgttcttgagaaatctttgcccttaggcacttctgtcattaaggcgttgatttcatcggcaggagagatactccacccataaattccagctgggacagtgactgtgccttcttttgtagaattgaaggtcaaatctttgtcaaaagtatcatactttgcctttaattgataaacgtatttggtaacggcagctttatctagactaattgtaccgttgttatacgttaaccaactttggatgtcttctttaggaacttggaaatcattaccattaactgaatagctgattttttcattagcaatcgtcttcaattgatcggcagtttttttcaattgcttgtccgtagatttcacttcaggttgcgcataatcgttttttaagtcgattgttgcttgaccttggttaataccgtgggcaactgcttttttgaacttagcggcatcaattgtgttcccgtagacttcttttacgagatcgaactgatgattctcgaggttaatatgggcattctctgaaggtttgcgatcagcgttgaccttttcgagggtttccgttgagaatttgtcaaaatcagcggcatttaaaatgagtgcgtcttctgatttagttgtttgttcactggcaaaaacgtggcctagccaagaccaaccgttttggcttttttcaatcttttccaataacggtttaaaattatggctaaagccagcttcttgaccgctaaaagttagcaatgtttgattgttatcctttagcgtatatttttgacgattcactttttttaagagttctgtgttagcgtctgcgactgattggccactaatgttgacaccggcaacggtcgtatgtggcaagaatgctttttgataatgaagactgactgccgagtaacctccaacaaggataacggctgctacgccaagggcgacgtaggctttcttcgtaagtttcacaacctcaactccaatctctgcataggttaatcataccccagtatcacataaaatacaaaggcgttaactaatagttagcatacaagatatgcacccaaaaagaaataaaaaagtattatttttaataaaaaatatgtagttgataatattaacaccataaaaaaacgactctcattaaatgagagtcgtttgaccaacagcaaagagcttattggcgagtttcgatatctaattcagcaaatgcttttgtaacgatatcttttaattgttttgcagaacggtgcatgctttccatttcgtggtctgtcaatggaatttcaaggatgcttgtgatacctgagcggttaataacagcaggtgaaccgataaagatatcgttcaagccgtattggccttccatgtatacagataatggtaagacagcattttcgtcgtctaagatagccttagtaatacgagctaatgcagtaccgataccgtagaatgtagcaccttttaagttaatgattgtgtaagcagcgtcacgaacactttcgaagatcttaacaagttcttcttctttaacttctggatgagctttaacccattcagaaatcttgataccaccgatgttagcgtgtgaccatacagggaattctgtatcaccatgttcacccatgatataagcatggaccgaacgtgcgtcaacgttaaccatttcagcgatgtctttacggaaacgagctgagtcaagtgatgtacctgaaccgataacgcgttctttagggaaacctgataatttccatgtagcgtatgtcaagatatcaactgggttagcagcaactaagaagataccgttaaagccagattcaacgattgggtcaacgattgtcttcaagattttaaggtttttacttactaagtctaaacgtgtttcacctggtttttgtggtgcgccagctgtgataacaacaacgtcagcatcttttgcatctgagtattcagcagcatagattttcttaggagaagtgaaagctaatgcatcagataaatcgattgcatcaccttgtgttttttctttaaagatatctacgataccaacttcttgtgcaataccttgtaaagttaatgcataagcgtaactagaacctacagcgccgtcgccgacgaggataactttttggtgatctttttcaatgtttgccaatataatgacgtcctttctgtaaatcaattcttcatttcgaaaaccagtatagcataatttacaccaaagttcgcgatttttggttaaattttcagaaaactatttctttcacaaagagagaaataaactgaatatggtataatggttcttaatatcaactggcgactggggagaattaactgctcagaatttttgcgtgatagcgccagtcaaaaagaggacgttaataatgaaaatgattgttggcttgggaaacccaggcagtaagtatgcaaagacaaaacacaacattggttttatggtgattgatcaattatgcgaacggtttaatgtgaccttaaacaagcatgattttgaagctgaatacgggagctttaaatatgaaggggaaacgattttcttagtgaaaccactaacgtttatgaatgattccggtcgttcagtcgggcctttaatgaaatactaccaagttaacctagatgaattagtagttatccaagatgatatggacttaacactaggcaagttgcgcttacggcaaaaaggttcagcgggaggccacaacggcattaagagtatcatcgcaagtgtccaaagctcagaatttaagcgtgttaaagttgggattcaacatccacaaaaaagtacagtcgttaactgggtcttaacgccgtttgacaaagacagcgcaccaattatcaatcaagcactagaccaggcatgcgaagcactagaagactggtgccaaaacgacgacttcatgaaaacgatgaataagtttaattagagtgtcgttggcagttggtcagattctgagcatttgcctaacttggcgaattgacgctgcaagcggcgatttgaaaagtgtagcaaagcgcaggaatctactgccaatgacacgtttcaaaaacagagtgcgtttggttgcggttagcaacagagcacgtttcttcgcgccattataataagaaagtaaaggaacttttacatggatttaatgacaatgctggggcagaccaaacaggtgcaatccgttttaaagaatcaacgaccagggattaaacaactacttacagggctttcgggatcagcgaaaaccctgtttttggcgacgatttataaacaacaacccttattgattattgagagtaatacgttccaagccaatcaagttgctgatgatttgagtaatttactcaatagtgatcagatttacactttcccagttgaagaagtgatggcggctgaaatggcagttagttcacctgagtccagagcggaacgtgtgcgaacgttgagttttttagcaacaggcaaaaaaggaattgtgattacatcggtcgcgggcatgcggcggttattacctacagcgcgtcagtggcaagatagtcaactcacaatcaataccgatagtgaagttgatccccaggcacttgctgcgcaacttggtgaaatgggttatttccgagataagttggttggtaaacctggtgagttcgcaatgcggggggatattattgacatttttccactggatgcggaaaatccggtccggattgaactctttgatactgaagtggattcactgcgttcttttgaagcagatacgcaacggagtattgagaatttagatagtgttcaaattatgccggcgactgacttattggccaacacagcacaattggaaatggctggtgaggcattacaagcagcttatgaggcggttgcggccaaaataacggataaaactgaacaaaaacaattggcgacaaactttgaaacaccgattgaacggttgttggccggtgaacgcgttgagaatttagcgttgtttgttgattatctgtatccagatcaatcaagtctgattgattactttaaaaagagtggcttagtgatttttgatgactatccgcgcattttagaaacgcagcggattttgactgaagaagcggccaactggcaaaccgatatgttggaaacccaccgcatgttgccagaccaacgactcatgatggatgcccaagcgctcatcaaaaaagatacacatgcgcatctctatctatcactgttccaaaagggaatggggaagttaaaactcgatgcactcaacaatttacccacgcggacggtgcaacaattctttagccaaatgccgcttttgaaaaccgagattgcgcattggcaaaagcaaaaacaaacggtcattgtgctcgtgtctgatcctaaacgggtcaagaagattgatcagacgttccacgactttgaaattgatgccgtcatcgccaataagactcagttggagacggggcggacacaaatcattcaagggtcacttcaaaatggctttgaattaccggatttaaaactggtggtcttaactgaaaaggaactgttcaatacggcgccgaagaaaaaagtccggcggcaaaccttggccaatgcagaacggttaaagagttataacgaattaaaaccaggtgattatgtggtccacgtcaatcatgggattggcgaatacgtcggcatggaaaccttggaagtcgatggggttcatcaagactacatcaccatcttgtatcgggataatgggaagttatttatcccagtcactcaactcaatatggtgcaaaaatacgtctctgccgaggccaaaacaccgaagattaataagcttggcggtggcgagtggcaaaagactaagagtaaagtttcggcaaagattgaagatatcgccgatgatttaatcgaactttatgcgcaacgggaggctgaaaagggatttgcctttccaaaagatgatcaattacaggctgaatttgaaggccagttcccctatcctgaaacagatgatcaattacgcagtaccgctgaaatcaagcatgatatggaacgcgtccgtccaatggatcgattattagtcggcgacgttggctttgggaaaacggaagtcgctttgcgggcggcttttaaggctgttgaagccggtaaacaggtggcctttttagtgccaacaacgattctggcgcaacaacattatgaaaacatgctgacacgcttcgcggattttgcggtcgaaattggtttactgtcacggtttaaaacgcgcaaagaagtgacggcaacgctcaaaggcttagcagagggcaaagtcgacatcgtgattggcacccaccgcttgttatcgcaagacatcaagtttaaagatcttggcttgttgattgtcgatgaagagcaacgctttggtgtaaaacacaaagaacgacttaagcagttgaaggcacaagttgacgtgttaacgttgacggcaacgccgattccacggacgttacacatgtcgatgctcggtgtgcgtgatttatctgtgattgaaacgccaccgactaaccgctatcctatccaaacgtatgtcatggaacaaaatgccggtgcgatgcgcgaagcgattgaacgggaattagaacggaatggtcaagtgttttacctccataatcgagtgagtgacattgaacgcacggtcgatgagattcaagcgctggttcctgaagcaacggttgggttcgcacatggtcagatgaccgaggcacaactagaaggtgtcatctacgactttgtccaaggtaaatacgacgtcttggtgacaaccacgattattgaaaccggggttgacatgcctaacgtcaatacgatgattgttgaagatgctgatcattacggtctttcacagctctatcaattacgcggccggattggacgtagtagccggattgcttacggttactttatgtataaacccgataaggttttaacggaagttagtgagaaacgacttcaggccatcaaggactttaccgaattagggtccgggtttaaaattgcgatgcgtgatttatcgattcggggagctggtaatttattaggtaagcaacaacatggttttatcgattctgttgggtttgacctatactcgcaaatgttgggtgaggccgtcgctaagaaacaagggaagcaagtcgttgctaaaacgaatgccgaaattgatcttaaactagaagcttacttaccagacgcgtatattaatgatcaacgccaaaaaattgaaatttataaacggattcgccagatggattcagaagcggcctttgatgaaattcaggccgatttaattgaccggttcggtgattatccagatcaagtcgctaatttattagcgattggtcagttgaagatgaatgcagatgacgcgttaatcgaaaccatcaaacaaacgaaagaaatcattcaagtcaccttatcggcgaagggcagtcgccttgtttcaggtgaacaaatttttgaagcgttatcgacaacccgcttgaaagcaacggtcgggtttgaacaagaacaattaagcgtgaaactcgtaatccagccgaagatgcaaccggcagattggttgagtgaagtggcaacttttgttacaagtctcttgaagatagaacaaaagcacacggaacaaccaacggattaggcacgctaagtggaggccaggcatgcaaaataaacagatgcaacatctgatgaaaggcgcggtcattttatcaattgcgtcgtttatcgcgaaggtattaagtgccgtttatcggattccatttcaaaatatggtcggtaacaccggcttttacgtgtatcaacaagtctatccaatctatggcattggcatgacgtttgcacttagtggctttccagtttatatttcgaaactggttgctgaacaagtcaatccggaggaacaaacgcagctgttaagacgctcatttgcactgttaggcatctttggtgctgcaatcttcatttatttacagtatcaagcgccgaaaattgcgggggcgatggcggatccagcattaacaccgctgattgaaatggtatcgtttatgtttttattgatgccgtttctagcggtgacgcgggggtacttccaaggaattttcaatatggtaccgacggcggtttcacaagttgctgagcaactcgtgcgggtcgtggtcatcttggcggcagcgtggctatctttgaaactgcactggtcagtgtatgaaatgggcacatgggcgatgtcaggcgccttctttggcggcttggttgcaacctatattttattacggccagcagaaaccgcctttcaactcaaggcgccacaccgtggtggcatcgattttaaggcgtatcaacaattggcaaaacgcttagcgattgaaggcgggtcaatttgcctctttgcttcattaattgtgttattacagctggttgattccttcacagttaaaaaagggttggtcctcagtggattatcggaagaacttgctaagaatatgaaggggatttttgaccgtgggcaaccacttgtccagctgggattagtcgtgtcacttgccttctcatcaacgttgattccgagtctgtcacaagcgcggcaacggcggcaacaatatcaatttcaacaagttgctgaagcgctgattcatatcagtttaggtttatcggcagcagcaaccaccggcctaatggttttgatgccgcagattaattatttcttattcggggatgctgatggtaatcaggcattggtttggtatatgttgagtatcgcaatcatcgcgctgatcaatgcttgcaactcggtgctccaaagtcttgatcagttccataaaacaacggcagccttaattgttgggttaatcgttaaagtagcaatcaatcaatggcttgtgcaacactatcaaattgttggcgcgagtgtcgggactgttatcagcctcggtgttgtgttagccttaattttacggcaatcaccagtgattgtacgtcaagcgcttggtttgcaacgctttaccggtaagttacttgcgatttgtgcagtgatgtggctgggtgttaagattgcgctacagtttgcaccacaatcacttagttccagaggacatgcgattttagggacgggccttggcgtactcgttggtgtgctcctatttggcggattagcattacggtggcagttattctcgattcgagaatggctgacgatgccaggtggccggcaactattgcgcctttcgaaaaaaataaaaggtaggacaaaataatgcgcttagataaatttttgaaagtatcacgaatcattaaacgacgttcagttgcgaaagaaattgcagacaagggtcgaatcatgattaatgatcgccctgcaaaatcttcaagcaatgtcatcgtgggtgataaactggaaatcggatttggtaataaaacgatggtcgtacgcatcacacagatcatcgaaactacgaagaaaagcgatgcagctgaaatgtatgaaattttggaaacaagacaagctgaaaactttgattaaggaaaaagcgctggccgaattaatatgggccggtgcttttttttgtgactttgttgagcatcttaataaaagtcattaagaatctgggatcttagttgacgacctttttgtgaaattgctataatgaacttagttccgagatggggggcttctaagtgagtcgaaaaattgcgaaaatcgagaatgcatttacccagcaacaagcagcccagaaaatcgtgcaagacaaggcagcccatgttaagcgtgttcataaacgccgcttatgtggcttggggattgttgcagtattagtcgtcttaatttgtggtgtgcagattttccaaacccatcattcattggccgagattagagaaacaacggcagctaaagaaaagacattaaaaaaagctaaagcaactgagtctgatttaaagattcaagtgcaacagctgcatgataatgattacttggccaaatacattcggtacaagtattactattctaaagacggtgaaaccatcttcagtttgccccaggacaaggcgcctaatttaaattagcaacaaaaataattcagaatacgaccttgtttcaagggcaaagcgtgctatacttattttattaaatatcacgcttaagtgattaaaagtttgacgagttcaaacgaccatttaggaggacgtagttttatatggcagttgaagttggttcaaaagttgctggtaaagtaacgggcattacgaattttggtgcttttgtagatttaggtgaaggcaaaaccgggttggtacatattagtgaagtgtccgatagttatatcaaagatattcatgatgttttaaccgttggtgatgaagtcacggtgaaggttatgtcagatcaaaacggtaagattggtttatcaatccgcaaagccgttgatcaacctaaagtgcaagaacatccgcgccctcaaagtcgtccaaataataatcgcggtggatatcgcaaaccagagcattcaagcgcacctaaaaaagaaggctttgatgatttattatcagggttcttaaaagatagtgaagatcgcttatcaacgattaaacggaatacagaaggtaaacgtggtggccgtggcggccgtcgcagttaatagaacaaattgataaaggttggcttgaaagtttggtgatagactttcggggcaacctttatttcatttcaagtctgtgttggagaggaatcggtatgttagaacaagcatttcaaacacatcttcaaaaagagcagttctggcaagccggcgacaaggttgtggtggcaacgtcaacgggagtcgattcaatggttttattgtggttattgactcatctgccccaaaaacaacgaccccaagtcgttgtggctcacgttaatcatgaattgcgtgcgcaaagtacggctgaagaaaaatatttaacccagttttgccgattgcatgccatcccgttacgcattcaacattggccaaaagcgagtcatcctgaaacaggggttgaagcggcggcacgtcaatttcgctatgctttttttgatcaagtcatgcgaaccgaatcggcgcattacttggtgaccgcgcatcacggcgacgatcaactagaaaccttgctcatgaaattagttcgtagcggtgaattgcatgaaatgcgggggattcggcaagtcagaccgtttaaaacggggacgttaattcgcccgctattaccttttagtaagcaacaactgcgtgattacgctgatcagattggtttgaggtattacgaagatcaaaccaatcaggaacaaactgttcttcgtaatcggatgcgacatgcggtggtgccacttttaaaacgagaaaatccacacttgattcaaaatgccaatcggttcagtcaaagtctgacccaaatggtggcacaccaagatgatctaaccgcggcgttactgccattgttggcaatcaaaaaacagccggcggcaattgaagggcgtttagaccaactcgatggcttgaaccagacacaacaaagggcgctctggcaattggtgtggcaacgatatttcaagactttaccggcgttaaaggcagcccagttaatgcaagtgcaacaattgttggcgaacccgcagaaaccgcaaggccaagtggcattgaacaatggcatcatttttgaaaagcagtatcggtgttttcggattggtgtccaccaaatagtggattctttggtcaaaacacgaacattagcgattaatgaatggctgcggttaaaaaatggcgaacaagttggtgttttcgatatcgaccatctacctaatcaagttcaacggcaacaggtcgtttggttagcaccagaggaatggccactgcaactcagggcgctacaagcaacagatcgaataatgcttgataaggcacaccacaaaaccattcaacggttatggattgatactaaaaccccacaggcaaagcgccaaaatgcatgggcggtttggaccccaaatcaattgcttggccggccggatttacggatttcggcgttgtttaatcgcgaacaaactggtaaaatacggtacatactatgttatttagatgattaagcaaattacggaggctggcacaatgttagaaaaagatattgaacgcgtattatattcaagagaagacattcaaaaggttaatcagcgcttaggaaaacaaattacagcggattatcaaggtaaaaacccgttattaattggtattttaaagggtgcgatcgtcttcatgacagatttgattcgcgaaattgacctccatgttgaaatcgactttatggatgtgtcaagttatggtgctgagaccatctcgtcaggtgaagttaaaatcatcaaagatttagatacgagtgttaaaggccgcgacattatcattatcgaagatattgtagatactgggcgcacgttgaattacttaatggcaattcttaaaacacgtcaagcaaactcaattaaagtctgcacgttaatggacaaaccaagccgtcgaattgtgccagttcattcggattatgttgggatggaagtcccaaatgaattcgttgtggggtacggattggactatgccgaacgatacagaaatatgggaacaattggcgttttgaaacctgaaatttattcgggtaaataaatggtcaataaaagtcagatatgttatagtttaacagtgtcaaaaggacactgtgtcacaaatgatgagaagcttcaggaggtcacgtatgaacaacaaaaagaatggactgtttagtaatagtctgttttacattattatcttagtggctttagtcggtgtgttctcgttcttcatgaacggtaacgctggatcagagtctaaggaagttcaatcaagtacatttttaagtgaattgaagaccaataaggtcaagtcattctcaattcaaccaacgaatggtatttataaaatttctggagaatatcgtaaagcacaaaaaacagaacagcctaaaaagaatcttttaggacaaaaaacaaaagcaagatcagttaaacacttcacaacaaccttattacaaagtgattcacaagttggggcaatgaccaagttagctgacaaatcagcaaccaaggttgaaacccttcaagaaccacaatctggttggtgggtaagtattttaagtcttgtattgccattgatcatcatgtttggtttattctacatgatgatgggccaagcgggtcaaggtggcggtcaaggcggtcggatgatgaactttggtaagtccaaagctcaaaaagccgacaagaaagctaataaagtacgtttctctgatgtcgctggtgcggaagaagaaaaacaagaattagtcgaagttgttgaattcttaaaagatccacggaagtttgctgcattaggggctagaattccagcgggtgttcttttagaaggacctccaggtactggtaaaaccctattagctaaagccgttgccggagaagcaggtgtgccattcttctcaatctctggttctgacttcgttgaaatgtttgtcggtgtcggtgcaagccgtgtccgtgatttattcgaacaagccaaaaaagcagccccatcaattatctttattgatgaaattgatgctgttggtcgccaacgtggtgccggcatgggcggtggtcacgatgaacgtgaacaaacattgaaccaaatgttagttgaaatggatgggtttacggggaacgaaggcgtcatcgtcatcgctgctactaaccgttcagatgtcttagatccagcgcttttacgtccaggtcgttttgaccggaagatcctagttggtcgtccagatgttaagggccgtgaagccatcttgaaagtccatgctaagaacaaacctttagccgatgatgttgatttgaaagaaattgcgcaacaaaccccagggttcgttggtgctgatcttgaaaacttattgaacgaagctgctctagtagccgctcgtcgtagcaagaccgatatcgatgcttctgatgttgatgaagctgaagatcgtgtgattgcgggtcctgctaagcgggatcgcgtgattaatcctaaagaacgtgaaaccgtggcttaccacgaagctggtcatgcgatcattggtttagttcttagtgattctcgtgttgttcggaaggtaacaattgtccctcgtggccgtgctggcggatatgccatcatgttaccgaagaatgatcagttcttaatgagtaagaaagaattaacagaacaaattgttgggttacttggtggtcggacagctgaagaaattattttcaactctcaatcaactggtgcttctaacgatttcgaacaagcaacggatattgcccgcgggatggttactcaatatgggatgactgataagctcgggacagtggcccttgaaaaagaaggtcaaccattcgttggggcagcttacggtcaaggcccagccttctccgaaacaactgcggctgcaattgatagtgaaattcgtcggattattgacgaagcacatcaacaagcacacgaaattattgaagcgcaccgtgaacaacataagttaattgcggaaatgctcttgaagtacgaaacattaaacgaaaaagaaatcttgagcttgttcaatgatggtaagatgccagaaaagaacgctgaagaattcccaagcgaaaaagcagctacttttgaagaagctaagaaggcgcttgaagcaaaagaagccgcaaaagaagattcagaaaaagaaactgataaaaaggatgtgacaatcacacctgatgaagatgatcaatcgacaccagctgaggataatcaacatccagacgatgaagcataaattgttacaccaaaaaggtcgacacgattagtggtcgacctttttgcatcaatccataaaagaggttatttagatgacagattatttaattaaacaaatttcagaagatggccaacttcgtgcttatgcagtgaacgcaactgatgttgtaacggatgcgcaagaaaaacatgacacatggtcaacttcatcagcagcgtttgggcggacgattgtcggcacccttttattgagtgccgctggcttaaaaggtgatacgaagatgacagtcagagttgaaggtgacggcccagtcgggaagattgttgtcgatgggaatgcgcaaggcacagttaaagggtatgtgacgaatccacacgttaacctaccattgaacgacaaaaataaaattgacgttaaaggtggcgttgggacaactggtacgttgagtgtcacgaaagatcttggcttaaaagaaccgtttaccggtcaagtaccattggtatcaggagaattaggtgaagactttacttactaccttgctaaatcagaacaaacaccatctgcagttggcgtttcagtcttcgttaatgaagataactcaattggtgtcgctgggggcttcatgattcaaattctcccaggggcggatgaccggttaatcgatatcttagaagcgcggctgaaagaaatgccgctggtgtctgaattactccaacaagggatgagcccagaggaaattatcactgaaattgtgggcgaactcccaatgaagacgttagaaaaaatacctgttaaatacgaatgtgattgttcaaaggatcggtttgcaaaggcactcagttctgttgcgccagcggatttacaacaattaatcgatgaagaccacggtgctgaagcggtttgtcgtttctgtggcaagcaatatcaatttacagaagcagaactaaaggcaattttagccgcgcaatagaatagtcgcaaatttttgcctgaatactatttttttgctatgataatttggatattgtcggaagacacgaagggaatgggttggcattatgacatggcaaataggagacgtgacgattccaaatcaagtagtcgtcgcaccaatggctggtattacaaacgcagcatttcgcgtaactgcaaaggaatttggcgcaggtttagtggtctgtgaaatgatcagtgatcgcggaattatgcacaataatcaaaagacaatggggatgatgtttgttgatccgaacgaacatccagttagcatccaaatttttggtggttcaaaagacaccttagtggaagccgctaaatttgtggatcaacatacacaagctgatattattgatatcaacatgggttgtccagtgaataaagtcgttaagacagatgctggcgcgcgttggttattagatccaaataaggtttatgaaatggtctcatacgtgacagacgccgtgaagaagccagtaacggttaagatgcggacaggctgggatgaagatcatattttcgctgttgaaaatgcacttgctgccgaacgtgctggtgcttcagcacttgcaatgcacggtcggacacggaaacaaatgtacaccgggcaagcagactgggacattttaaaacaggttaaatctgaattaacgattccatttatgggtaacggtgatgtccggacaccacaagatgctaaacgtatgctagacgaagtgggtgctgatgctgtcatgattggccgggctgcgctcggtaatccatggattttaagccaagtggaaacctacttacgaacaggtgaattgattgctgaaccaaccccatgggaaaaaattgcaacggccaagttacaattacaccgtttagtcgaacttaaaggtgaaaatgtggcttgtcgtgaattcagacaacaagctgcctattacttgaaagggattcctcgtgcggctaagaccaaagcggcggttaacgaagtggaaacggaacaagccgttggcgatattttagaccgctttgtagaagaaaccgaagcgagaatggcaaattaggttccttatgttggtgttttcgtgttaaaatcaacattagtagataattgaatgtatggaggaattgtcagttgggacaaaaagataatcaaagagaaatgaacgaccaactaaaggtccggcgtgaaaaattacaactgttaaaagacgaaggaattgatccttttggtagtcgttttgatagaacacatatggctgcggaattacacagtgaattcgaagcaattgaaaaagacgatttagatgctaagaatctagaagtcacaattgcaggacggatgatgtctaaacgggggaaagggaaagttggctttgctgacatccgtgaccgttcaggtaaaatccaaatttacgtgcgtaaagatgaagttggcgaagaaaactatttaattttcaaaaaggctgacttaggtgatcatttagggattactgggcaaattatgaagactgacatgggtgagttaactgttaaagcaacgcacctgactttcctatcaaaagcattacgaccattgccagataagttccatggtttaaccaacgtggaacaaatctatcgtcaacgttacttagatttaatcgcaaatccagagagcttggatcggttcacgaaacgcagcaagattatttctgctgtccgtgaatatttagataacaatggctttactgaagttgaaacacctgtcttgcatggtcaagctggtggtgcatcagcacggccatttattactcatcacaatgcgctagacatcaacttgtacttgcggattgcgcttgaacttcatttgaaacgattaatcgttggtgggatggaacgtgtctatgaaattggccgcgtattccggaatgaagggattgatacgaaacacaatcctgaatttacgatgctagaaacatatgctgcatactttgattataaagacgttatggatgaaacagaaggtatcatccgatttgcagcgcacaaggttttaggaactggtcagatttcatatcaaggacaagcgattgatcttgatggtgattttggacgggttcacatggtcgatgcaattaaggaaaagacgggtgtcgatttctggcaaccaatgacggttgaagcagcgcgtgaattagctgatcaacaccacgtgaagtatgaatcatactggcaagtggggcacatcattaatgcgttctttgaagaattcgtggaagatacattggtacaaccaaccttcatctatggtcatccagttgaaatctcaccattggctaagaagaatgctgaagatgatcgtttcacagaccgttgggaattatttatgcacggtaacgaatatgcaaatgcctttactgaattaaacgaccctatcgatcaacgtgaacgttttgaagcacaagctaaagaacgtgaaaatgggaacgatgaagccgaaggaatcgatgaagattacatcgaagcattggaatacggaatgccaccgactggcggacttggaattgggattgatcgactagtcatgttactgacagatgccgcatcaattcgggatgtcttattattcccaacaatgcgtccagacaacaataataacgattaagattaaactaaagcccgcaagcagacgatttgcttgcgggctttttttattgaaaaaaattgggattataaaaagtttttttagtgtattttgtgggtgaataagcatcaactttcggtatattatgttgtttgcgcgagttgttcgtttaatagttcatttatttgcataaattgcggatactagcgactgtttagattatgaaagttcataaataacagttgagattaatagttgacgaaaggctgtagagctgatatagtagtctatgttgtcagcgagataaaacatttttgctaacgagtcaggtaattaaatcagtttgaatatttattcaaaaagtatttaaaaatgcttgacagtgttcgttagaaatgatatattaattaagctgtttcaacacagtagatctttgaaaactgaacaaagtttcgacaaaccaaatgtgtagggtcgcccttcggggcacggattaacaactacgactcattcgaatcaaaagaaagtctctggttatatttatcgcgtcggtaacgattatttagtgctaaactctgtaaaagggttcatcaaggatgccactgctatgaaacactatcttgaaggtggcaaagaacaaactacaaatacgtattttgaccagccaaatgtgtttgcaatcgctaaagatcaagtaggtaagcatgctaagctgtttaaacttgcgtacggcacgatcacttacgaagagcttcctgaaaatgatcgcgcgtatgtctctttcgctatcattacagacaagaatattgatgaattacccaaaatcaagattgatcaaatcgactaccaagtaatttaaactaaaatagcgcgtctcactatcttacaagtgcggcgcgctattttattctagtcacgccgttgatacgccatgactgtcagtggcataaacaccagaataatcacagcgccactgacgaggaccattgttgcggttccgctccaatgaccggtgttcaaaattcctctgattgccgtaatggttgtggtgacaggattaatgcggacaatggtttgtagaaaatgcggtaaggttttaactggaataaaggcgttcgataagaaggtcaataccagaatgatgatcatcgataaactactaatcagttcggcatttttaaccagtaaaccgactaaggcgaaaatccacgacgttgaccagccaataaagacagctaggaataacgccatcatgagtgcgccaaaattagcggtagggcgccagcccattagtgccgcggtgaccattgccatcccaccggaaagcaacaatcgtaagctatcaccaactaattgaccggcaagcggggcgattggcgcaattggtaggtcttaaaacggtcgaagattccctgattgatatcttctcgtaattgttgaccggaacctgaagcggcgtttaagatactctgtactaaaatcccagaaaccaacatcggtaaataggcgtggacgctgccggcaatgacaccaccgaataaatagccaaataacagcgtgaaaataattggctgcaccagcacatcactgacattatcaggattatgcaaggtcttcagtaaattccgatgggttaacgttaagctattgcgcaacacttgcgtatttgttttcatttgtagcatgttattatctccttagtttttaccaacggtcattttcaaaaagacgtcatctaacgatggggctgtcaattgtaaatcgctgatggtgatgcctgccagctgacattgatttaaaatcgcggtgatgacgcccatatcatcgtgcactaacggtccaatgattgtttgatccgtcacacgcacgggctgttgcaaaacggtctcgcaaatcgtctggacctgcgcaacttgttgttgattggcaaccgtcaactgctgaccaccgacttgcgctttcagctcactaggtgtcccactggcaatcaattggccatgatcaatcagcgcaatccgatccgcatattgatcggcctcctctaagtactgtgttgtcaaaaagactgtcgagccatccgcgactaatttttgaatcacatgccacatttgcgtccgggttcttggatccagaccagtggtaggttcatcgagaaagaggatccttggcttgccaactaagctgaccgctaagtccaaccgtcgccgcatcccacctgaaaaagtcgccaatgtttgatccgctgattggtccaaatcaaagtccgtcagtaactcgttagctcgggttcgactcgctttggcactgagcccatttaaccgcccaaataagcggagattctcgcgcgcacttaagtcttgatcgattgccgctgtttgattggtgacactaaactgttggcgcacttggcggctttgtgttatcgtatcaaagccatttaatgtgattgtgccactatctggtcgtaggagggtggtcatcatttttaagagcgttgttttcccggcaccattgggccctaataatgcgaaaatctcacctttagaaacggctagcgaaacggaacgcaccacttttttggtcccaaatgctttttgaatattgtttacttcaatgacatgctcactgcacataatattgcctcctcatttaataatcaggtcacctgattaatttatatagtaaggtcacctgattaaaatgtcaaggattgctactcttagattttggaatggtgtatactaattaaaacagcgaagggaagatgacgtatggcaaagagtgtcaaggccgaattggtcgccggaaaattagctgaatatgaacaactcagtaagatctacgatgatatcgttaaacaagcacgcccgcatttaatcgtcgaaggccaggggaagattctattggcacttgctgatgaagatcacttatcgcaacgtgaactagcaacgcgtttgggaatgtcacctcaatcaaccagtgaatttgtcgctaaactcgctaaacgcgagctggtgacgttaagtaagctcccaagtgatcgccgggttaatttagttaacttaacggatgccggtcgtcaagaaattgaaactgccaatcaagaggtgccaccgtttgtgaacgccttgaccgaggcagaactcgaccagttagtgccactactcaacaagattacaacggcgatgtatgccgatatcgatgcctcaaatccgacgttgggcgttaagtttcataaattattggccggacgatatctgaaacaatttaaaaaataaccaaaaaaatagcgcgtctcacttaaattagtggggcgcgctattgcatttaattaatcaaagtcgtaatcactatcttccatcgcttccacattccctaagcgataaccattcccaacttgggagaagaaatcgtggttggcagttgaagtcgacatcccattcaagatcacggggttcacatcttcagcgctatctgggaagagggcgccttggccgaggttcattaaggctttgttggcgttataacggaggtaagttaatacttcttctgtccaaccagtgccatcataaacttcgtgggtgtatttttcttcgttggcatataagtcgtacagtaaatcatacatccagttttgcaattcttcttgttctgacttatccaattcattgaaggctaattggaacttatagccgatgtaagtcccatggactgactcatcacggataatcaatttaatgatttcagcaacgttggccaacttattgttccctaagtaatagagtggggtatagaaaccagaatagaagaggaaggtttctaaaaagacgctggcaattttttgttgcaatggtgtgccgttttgatagatatcgttaatcttgttggctttgtattgcaagaattcattcgtgttggtccagtcgaagatttcatcaatttcagttggtgtgtttaacgttgaaaaaatggatgaataactcttcgcatgcacggattccatgaattgaatgttgtttaaaacggcttcttcatgttgagtgcggatattggcttttaagctggccatcccatcttgtgattgtagcgtatcaagtagggttaaaccgccaaagacatgcccgacgatccatttttcattgtctggtaaactgcgccagtcatctaagtcattggaaaggggaatccgcgtatctaaccaaaattgttcggttaatttttcccaggttgctttatcaatttgatcttcaacttggttccagttaattgcaatataattttctgccatgttcatgaactccttttaacgtgcttcttttttaggtatgtaggccagctgacgagcagctggagtggagatttggtgcttgttttgaaacgtgctttttgaaactgacttctgcgcttagttacactcgtcaaacaactgcttatagcagttattcgccgagttagactaatgctcaaagtcaaaccgtttcaaacgcactctagattacacaactttcgcatgcgtttgcgccgacttcactttcgtcgtctgtgtaagtccggatgtagtagattgatttaatccctttgtggtgggcgtagtttcttaagatgtttaagtcccgggtggtcattttgtcagtccggccgtttttccattcgtaaaggcctgctggaatcgttgaacgcatgaagagtgtcatactcatcccttggtcgacatgtttttgtgctgctgcgtagatgtcgatgactttacgcatgtcaatgtcataagctgattcataatatggcatggtatcgtttgaaagacctggggcagggtagtagattgtcccaattttcttttcttgccgatcttcaatccggttaacaatcggttgtaagctagcagaagtatcattgatgtatgaaattgaaccgtttggtgcaacggctaagcggttttgatggtataaaccgtcttgcatgatggctagttttaaagcttcccaatcggcttttgtgggaatcataatgtccttgaaaatcgctttgactttgtccgtcttaggggcccagtcttcagtgaggtattgatcgaagtaactaccatcagcatacttactcttttcaaagttggcaaaggtcatctgacgttccttagcaatcttatttgaagcaacaagtgtccagtagtttaaaagcatgaaataattactggtaaagtcgattgattcttctgacccatacatcatgtggttcttggcaaagaaggtatgcagacccatgccacctaaaccaatggtgtgggccaattcgttcccatgagccacagaagggaccacatcaatatcagaatgatctgtgacgtaggttaaagcacgcaccatggcttcgatagaaccaccaaagtcaggtgacgtcatcatgttcggaatattcgttgaacccaggttacaactgatatccgtccctaacacgtcatattcttggcggttattaatttgtgacggggtttgcacttggaggacttcagaacagaggttactcatgatgatcttcccatcaattgggttcgcagcattggctgtgtccacattgacgatgtaaggataacctgattcttgttgcaatttactaatttcattttctaaatcacgggctttaattttggttttcttgatgttatcgttggcgattaagttgtcatattctttggtgatgtcaacatatgagaaaggtacgccgtattctttttcaacaccgtaagggctgaataaatacatatcagcatcagctttcaccaattcatagaacttgtcggggacgactaagcctaatgagagggtctttaaacgatatttttcgtctgcattttcttttttagcacctaagaaagcaatcacatctggatggaaggcgtttaaataaaccacgccggcgccttgccgttgacctaattggtttgagtatgagaaagaatcctccaataacttcatgacagggaggacaccacttgctgcaccgtcgatgcctttgattggatcgccagctccacggaggttcgacaagctaatcccaaccccgccaccaatccgtgataattcaagtgccgagttaatcgtccgaccaattgaattcatatcatcggttgtttggagtaagaaacatgaaactaattcaccacgccgtgaacgcccagcattcaaaaacgatggtgttgccggttgataacgttggtggatcatttcatccgctagttgcagcgcaagggtttgatcaccatctgcgaagtagagagcattcacaaaaacgcgatctttaaaatcttcaagataaaagccattgtcgtttgtttttaatgcgtattgcgcatagaacttataagcagccataaatgacttgaagtggaagtcttggtcctttaaatattgattcaattcttccatgaatgaaagagaataagccttcaaaaaatctgcttcataataattttccgcgactaaataatctagacgatcttgaagtgatttaaacgtcaccatattgggttgtacgttttgttccaaaaaggcatcgagtgcttcttgatccttttgtaatggaatttgaccattcactggaatattaatttggttattcaattcatagtatgttacatcttcggttttaatctcttttaaagacatccttgccaccactttctagtcatattagctgttttagggtttaaaaaaagtgaagaccaactctttagtaatcaagagtcggcctcacccgttaaaactgggaatgcatggtgcttaaatcgccaatttttgcaattccgctggtctaaaacctgagaagctttctaggccatccgcttctaaaacgggaacggcttggaaaccttgttccttcaagtaatcaatatattgtggttcgtcattgatgttatgttcaacaaaaggaacgttgtgcgtttctaaaaagtgtttcgtcatccggcattgtgggcagccgttcttagtatataatgtgatatttgccataatcgttaactcccttgtatttctcttatcgataaaaatagtataccgttttgaaatggaagatgcaatcaataaacaccacatattgtagataaaacaaaaaacgaccactaattatagtggtcgtttacgaatgttcatttgattgtcttgggcaacgtcctgtacttaagttaaacatatttatgggtaaagtcaatccctgctaatgcgcaaaatttttcaaaagcacgccggacaaagcttaacagattttaaaaaattttttagattgggattaatttaatattgcaccatcataaaaatgagttaacgaacattttataaaattggtgaaagtaaccgtgaaaatttttgtttaaatttcaaccaagttgactgttgggcgattatttcgtctgttagtagggatgctttttccatatcagcctgatagatcgcttcaagttgcgctgcaactttcggatcgtaaataaacgtattggcttcaaagttcagcttgaaactacggatatccatattggcagaacctacagtgctgatatgcccatccatgaccgccgtcttagcatgtaagaatccatcttcataccggtaaatcttaacgccagctgcatgcaagagttgactgtagtattctgttgcacggtagatgaaggggtgatccggcatgttaggcgtcatgatacgaacatccaccccggacattgccgcagtcgtcaacgcatcaataatactatcatccggaactagatagggcgtttgaatccataaacgcttcttagcggtactaatcatcttcagataaccgagtttgatttgttcatctaatttatcgggaccacttgagacaatttgcatggctgctgatccacgattttgggattggtccactgggaagagttcttccgagtaagttaacttaatcgcaggctcaacgctcgcgttccagtccatcataaagcgtacttgtaaggctaacacggcattgccggtaatccgcatatgggtatcacgccaatgtccgaatttcttactccggcctagatattgatcaccaacgttaaagccaccaatataaccaatcttaccgtcaattaccacaatcttacggtgatcacggaagttcaagcgaaaatcggtaatcgtgtgttttgaactgaagaacgttcgcgcgtggccaccgacatcttcaagtgcgcgccaccatttttgcgttgcgccttgggagccccaagcatcgtagacaacgttgactgaaacgccttctttggctttttgaatcaatagttgttgtaactcattgcccaatcggtcattatagatcgtataatattcgatatgaatacttttttgagcttgtttgatgtcggcaaagagggcgtcaaattttgcttgcccgtcagtatagattttgacatggttattctttaaaacgggtgcattattaatatttaaaaagagattcaccatttcggatgcttcactggaaagcatctttttcggtaagaggtcgtttttacgattttccttacgttgaatgtcgaccaatgcggaaagcccatcatcgatttgcgattgactttggaaaatctttttccgcgataagccccgtccggtaaacatatataggataaaaccgcccacgggtagtaaaattaagactagcagccacgcccaggtggccgcaatatcgcggggctgtctcaaaattgtaataattgccaataaggcattaatgaagatgatgaatgacattatttctgtaactaaaaccatatcgtactcctccaaaattctagcgttgcttattattttactaaaatcacgctcaaagcgctagttaagcctatcaacagtcagttaaatgaggtaatccctgttgggccagatggtgcgccccctgattctgacgctctggaatccattggtggatgaccattgaataaggcgcctcaagtgctagaatccggtcgacggcagcttgataatgtttagcataccgcttttctaggctctgaaagacaagcttgctgtcaacgttaatctgtagtattttcgtggtaagcccccgattggctagttgttctaagccaagaatgaccgccgcaaattctgcatcatgattggactgttctggcaaaggtgcttgtagttgatattgtcgctctggtgtcacgattaaaattcccgccgcacttggtccgggattgccacgagttgctgcgtccgtataaagtttaatcattcttaaaatttaccgcctttcactgacagcagggtcaggttaatggtatgatacaaagcgtaaaaaggagtgttctcatgcaaaagacaaccaccgcattctaccaaccaaattatgcttacttcgtgacgatttggtcttggattggcttcgtctatacattagctttaattgtacaacttgaactcatcaacttaaactggcaatcgtggggcatcggcttaattgccgtttggttgacgctatgggtcattttcgggcatcgtgtttcaatgacggcagacgtgatcacgcttaaacggccggtatttaaatataatcgaaccatcaaccgtgaaacgactacgaccattattgtccaaaaacatggtttattaattaaaaccaacgaacttgattaccaacccgaacaaatactccttagtcgcaaagccaagcaggcattcgttgaacaactgaaacaaaatggttggccaattgaagaatagttaaataaaaaagagccacgacaaacattaatcttgtcgtggctcttttttagcgtttaaacgtatttttattctgctatcttttgcacgttagctgcctgcaaaccgcgggcgccttctttaatctcaaataataccggctcgtctttattcaatgatttatagccgtcggtttggattgcggtaaaatggacgaaaacctcctcgtcatctccataactgatgaagccataacctttagcattgctaaaccacttaacgattcctcgttccatcacaatccctccttgaaatgttaatcagcgtacgcgcttattttaccacgtacaaagaagtgtgtcgaagaatatcgttctttttaagcatcccatctgccaattccgtacgtaatcagctatactaggtagtatcataaataaaaaggagctgggcggtatgtcagatattcaaatagcacaggaaaatgaagctaaggagatgcagccaatcacggcaattgccgaacaagctggtttaacggccgctgatttagaacaatatggaccgtataaagcgaaggttaatttcgctgccattaatcgattgaaagaaaaagaagatggcaaactcatcttagtgacctcaatcaatcccacaccagctggagaaggtaaatcaaccgtgactgtcggtcttggcgacgcccttcgtcaactagatcaatcagccgtcattgctttacgtgaaccttcactaggccccgtcatggggatgaaaggtggcgcaactggtgggggctatgcccaagtggtaccaatggcagatattaacttacattttacaggggatatgcacgcattgaccgctgctgtgaatactttagccgccataatcgataaccatctgcaacagggaaatgccctcaacattgatccccgccgaattatttggaaacgggcgcttgatattaatgatcgtgcattacgccaagttgtcattggacttggtggtccagtgcaagggatgccgcgccaagatggttttgacattaccgttgctagcgaattaatggccattctctgcttagcaactgacattactgacttgaagcggcgcattagccaaatcgtcattggttacacttatgatcggcaacccgtcacagttggcgagctcgaaatcaccggtgcaatcgcgatgcttttaaaagatgccctcaaaccaaacctcgtccaaacgcttgaacatacaccagccttaattcacggtggaccatttgccaatatcgcccacggctgtaacagtattttagcaacccaaacggccctaaaaatgggtgatattgcgattactgaagctggcttcggcgctgacttaggtgctgaaaagttcctagacatcaaagtcccacaacttggcaagactcctgataccatcgtgattgttgccactgttcgggcgttaaaatacaacggtggtgttgctttagctgatctaaccactgaaaatctcggtgcgttagacaaagggtttagtaacttagccaaacatattgctaatatgcaacgttacggcattcccgtagtcgttgccatcaatgagtttacaagtgataccgaagcagaggttacaatgctccaagaaaaatgtgctgaactgggtgtcaaagccgttttagctagtgtttgggcacatggtggtaaaggtggccttgatttagcccaggccgtcttagaagcactcgatcaacctaaaaacttccaaccattatatgattcaaacgccgacattcaatcgaaactaaccacaattgtcactgacatctatggcggtaaagaggttgttttcgagggcaaagctatcaaccaactgaaagaaatcgaaaaaaatggctgggaccacttaccagtctgtatcgccaaaacacaatattcactctcagacgatccaaaagcattaggcgcaccaactgatttcaccgttcacgtccgtgaattgattccaaagcttggcgcaggcttcatcgtcgcaatgaccggcacagtcctcaccatgccaggtctaccaaagaaaccagccgccctcaacatggacgtcacagaagatggcctgattagcggattattctagagtgcgtttgaaacggttagcttctgagcattaatagaatttgacgaattgccgatacaatcggcgatttggcaaatttggttaagcgcagaaagttagcttgaaaagcacgttttccaatatcctaacgcccatctcgaaaactgattgacaagtcagccgattttaaggacaatggtagattgtatgaataggaggttcccatgctcatctatatcgttttagccgcagtcattgtactcggtgaccaacttttaaaaagctggattgttgcccatgttgcctttgcagcaacccaacccgttattccgaacgtactgagtttaacgtatgttcaaaacgatggggctgcgtggagtatcttggccggtcaacagtggtttttctacctcgtcaccattgtggccctcggggtaattggctacttattttatacctctgatcgcactgaaaaattttaccggatcggtttaacgttgctgttagccggaacacttggtaacttcatcgatcggctccaccttaagtacgtcgtagacatgttccaaatcgaatttattaatttccccatctttaacgttgcggatgttgccttaacagtaggcgtcatctgcgtctttattgctattttgttgaaagagaaagtgactcatgactgaaactaaacaattaacgattacaactgaaacaggccggattgataaggcgctcacccaattactacccgattactcacgttcacaaatccagcaatggttgaaaaaagacttggtgcaagtcaatgatcaaccttgtaagagtaaccgcaaagtcgtaacaggggatgtcgtcaccgtcaatattccagaccctgtcacgctcgacttaaccccagaagatattccgctcgatatcgtctatgaagacgatcaagtcctcgtagtcaataaaccacaagggatggtggttcatccatcagctggccacccgaatgggacattggtcaacgctttattggcgcacaccccattgtctgaaatcaacggcatcttccggccggggattgtccatcgaattgataaagatacctctggtcttttgatggtggctaaaaccaacgaagcccacgaatctttatccgcccaactcaaagctaaggaaaacttacgtgaatatatcgcgctagtccacggcaacatcgaagaagacgaggggaccattgatgcacccattggtcgttcaaaagtcgaccggatgaaacaagcaatcgtcgaagatggccgcccagcggtcacgcattttacggtcatggaacggtttgaagacttcacattaatcaaatgtcgactagaaactgggcgcacccatcaaattcgcgttcacttagcctatattaaccggccagttgctggcgatcccgtttatggtccccgcaaaactttagctgggcatggtcagttcttacatgctgctgtattaggctttaagcacccaacgacgggcgaaatgatgcgctttgaagccccattacccgcaatcttcgagaaaactttaaccgaattacgtgaaaatcattgacaaatcaaggattctccgttaagctaggtctaacttaatagaagcctttaaaatcggtcccgtgaggccgagaaggtacggtgaaagcaccactagacgcggagtctctaactgtaacctctcgaccttatcggtttgagaggttttttgtttggaaggagtctttacgatggtcaaagaagtggtcgacagtaacacaatgaaacgggtctttactcggattacgtacgaaattatcgaacagaataaggggatttcagatctcgtcctcgtcggcattaaaacccgtggcgtgtttattgcccaacggattgcagaacgcctcgaacaattagaaggcatcgcattgcccgtcggtacactagacattacgttataccgcgatgatcaacatgatcttgatacacaaaatgaaccacagattaacgggagcgatattcccgttgatatcacaaataagcatgtcatcttaatcgacgatgtgctttacacagggcggacgattcgggccgcgcttgacgccttaatggacttaggccggccaaagaaaatttcattggctgtcttagtcgatcgtggtcatcgtgaattaccaattcgccccgattttgtcggtaaaaatattccaaccgcgctcaacgaacaaattcgcgttgcgatggaagaaattgatcaacatgatgggattaccatcgaaaaactaactaaataacgactgaaccgtttaattgtctccagagagagcaaaagggtttgtcttgaacttagtgcgcctaaaaaaaggggcctaagtccgtcaagggacacacctaccaatctgttggagcgtgtgtctttttttggttcaaaaagtcgtcgacatggaggaaatacttatggctacacaatttagaaatcccgatgcggtcttagacgtcaacgaacgacccagcaccggtaaatggattggtttatccattcaacatatgtttgcaatgtttggctcaaccgtcctagtgccaatcttagtcggtttaaacccagggattgcgttattcagttccggggtcggcactttaatgtacctcttgattaccaaaggcaagattccagcatacatggggtcgagtttctcattcatcgtgccaatgctcgctttaatgaaaacgactggctatcctgggattgcacaagggacaatggcggttggggcagtctacttaatcgtttcaatcttagtcagtctgattggttccgactggatcgacaaagccttaccacccattgttgtcggcccaatcgtgatggtgattggcttatcactcgctggcacagctgccaaacaagccactatcaatgcccacgggaattacgacttaaaattcttcgcagtcgctttactaacgttgttaatcaccatcggctttaatatgtatctcaaaggattcatgagcttagtccccatcttgctcggcatcattgctggctacatcatcgccgtcttgttcgggatcgtcgattttcaacccgtgatggacgccccttggtttaaagtaccagacttccaagtcccatttgtcacttacaaacccggtctgtactggggcgcgattctcagcatggcaccaattgcctttgtcacaatgaccgaacacatgggccacattatggtcttaaacaaactcaccaagcgtaacttctttaaagatcctggtcttcaccgcacgttagccggggacgggacagcctcaatcatcgccgcttttgtcggaggaccgcccgtcacaagttatggtgaaaacatcggtgtcctcgccatcaccaaagtccacagtgtctgggtcttaggtggcgccgcattcttcgccatgatcttcggcttcatcggcaaactgagcgcgttgattcaaagcatccccacacccgtaattggtgggattagcttcttactcttcggggtcatcgcctcaagcggtttgcgcgtcttaatcgacaaacaagtcgattttgataagaaacgcaacttaatgattggttcatcaatcctcgtcatcgggattggcaatgcctacttacaattaggccaataccaattctcagggctagccatcgccaccgtccttgggattgtcttaaaccttgttttaccggataaagcaaagagcgaacttgaattggaggctcaacaaaatgcaaaagcataacgcgttggtttccgttgatcaactcaccaatgatttagtcgcaggtctcatcaaccgcgctagcgcctttaaaaagggcgcgacaagcaaattaactcggccggtctacgcaatgaacctattctttgaaaatagcacacggacccatacgagtttcgaaatggcagaacgcaaactcggcatgaccgtcttagacttcaatgccgatacgagttcgacttccaaaggcgagaccctcagcgatacgctcaaaacggtacaagccattggcgtcgatttcgttgctgtccgccattctcagaataattattacgacgccttactcgcagatgatcaattccacatggcactggccaatgcgggcgatgggagtgggcaacacccatcccaatgcttactcgatttaatgacgattcacgaagagttcggccactttgtaggcttaaaagtcgtcatctgtggtgacttgcgtcattcccgggtggcacggtcaaatatgcaactgctcaaacaactcggcgcaacattgtattttgccggccctgaggaatggttcgcccctgaatttgcccaatacggacaaccagcccaactcgatgacgtcttaccagaagttgacgtcgtcatgttactccggattcaacacgaacgctttgctgccgatgaaaccttatctgacactgcattccatactcagtacggtttgacaactgagcgggcagcacaccttaagtccagtgctatctggttgcacccagcacccgtcaatcgtgacgttgaaattgccgacgaactcgttgaagccccacaatcgcgaatttttaaacaaatgaccaacggcgtttttatgcggatggccatcattgaacacctattagaccaacaacatctgattcaacattaagagggggatctgctatgtatcaattgatcaaaaacggccaagtcttgattgacggccaactgcaaaaacgcgacatcgccatcgatgcaaccggtcagattacggcaattgaaccaacgattaccgcagtcccaaccgacccagaaacgatttatgacgcacacggccatttcgtcagtgccggcttaatcgacggacacgtccacttcagagatccaggcttcacgacaaaagaaacactcaaaacagggagcgcagcggttgcccacggtggttttactagcgtaattgcaatgccgaacttaaagcccgtacctgataacttgctagatttcaagacactggttgcacgcaatcaggcagaaaccagcgtccacacatatcaatttgcaccgattaccaatgagttaactgaacaaacaattgtcgacatgtcggcgtttaaggcagctggtgcagcaggctttaccaacgatggtcatggggtacaaacggcacaaacaatgtaccaagcgatgcagatggccgcccagattaacatgcccatcgtcgcgcacgtcgaagatgaatcactcgtcaatggcggcgtcattcacgacggtcaagccgctaaaaaactaggcgttcccggaattgcgagtgtcagtgaatccgcccaagtcgcccgggatatcgagctagcgcgggcgaccggcgttcattatcatatctgccacatctcaactaaggaaaccgtcaatctcgttcgccgcgcaaaacaagatggcctcaacgtcacttgcgaagtcaccccacatcatttgttactcgatgattcagcgattaccagtgacaacgcaatgctcaaaatgaatccgccacttcgaacacttgcagatcgccaagcactctgggcgggcttaatggatgggacgattgatattattgcgaccgatcacgcaccgcataccacaaaagagaaacaacaggcgttattgaaagcgccatttggtatagtagggagtgaaacagcctttagcttgctatacacgcatttagttgccaacggtccatttagtctcgcgcaactgacaagctggctaacaaccaacccggcccatgttttcaacttaccacacgccggccagttagcggttggccaaccagctgaccttgctgtttttaatttaacggataccaccacaatcgacgcaaacactttcttatcgaaaggccacaacacgccatttatcggcgaagcagtgcaaggtgatactttattaaccttggttgctggtcagattgcatatcaaaaggagtgtgtcatcaacgggtaacttctgagcatttacctgacttggcggattggtgttgcagacaccgatttgacaagtgtcgtaaaggacaagaagttgttgatgaaagcacgttcaaaaaaggagtgaactaaaagatgaaacgttaccttattttagaagatggcaccatcttccccggcaccggttttggcgccccaattatctcgacaggcgaaatcgtctttaacaccgggatgagtgggtaccaagaaaccattactgatcaatcatacaacggccaaatcatcgcttttacataccctttaatcggtaattacggggtcaaccgcgacgactttgaatcgattaaaccaacctgtaaaggggttgtcgtccatgaaacaccacgcctagcaaataactggcggatgaatatgagtcttgatgactttttaaagcaaaagaaaattcctgggattgccggcatcgatacgcgggcactcactcgccgtctgcgcgataaagggaccatgaaagccagcatcgttgatgccgcagacgatcacgcgttcgatcaactcaaggcattggtcttaccaaaaaaccaagtccaacaagtttcaacggccaaaccttatccgagtcctgctaacgggcggaacatcgtcgtgattgactttggcttaaaacatagtatccttcgtgaactgtcaaaacgcgactgtaacatcactgtcttaccatacaacacaacagctgaagaaattctgagtctcgatccagacggcgtcatgttaaccaacggccctggtgatccagaagatgtgccagaagccattgaaatgatcaaagggattcaaggtaaagtgccgattttcgggatttgtctcggtcaccaactttttgccctcgccaatggggctaaaacctacaagatgaagttcggccaccgtggtttcaaccatccggtccgagaagttgccaccaaacggatcgacttcacatctcaaaatcatgggtacgccgtggatgccgactccatcgacccacaaaaccttctgattacacacgttgaaattaacgatcaaacagtcgaaggtctccgtcatagacaatatccggccttttccgttcaattccatccagacgcagcccctggtccacacgacgctgcacatctattcgatgaatttatcgacatgatcgatgacttcaatcgccgccaaaaatagtaaaaaggggatttagtgatgccaaaacgtaccgatattcataaaattttagtgattggctctggcccaatcgtaattggtcaagccgccgagtttgattactcaggcactcaagcctgcttagcgcttaaagaagaaggctaccaagtcgttttaattaactcaaatcctgcgacaatcatgactgataaagccgttgctgatacggtttatatcgaaccgatcacgattgactttgtcacgcaaattctacgcaaagaactcccagatgccatcttaccaaccctcggcggccaaaccggcttaaatatggctttggaactggcaaacaacgggattctcgccgagctgaacattgaattgctcggtaccaagctcagcgcgattgatcaagctgaagaccgcgaactgtttaaaaacttgatgaatcagttaaacgaaccgattccagaatctgcgattgcccattcactcgttgaagcccaaacattcgttaacgaaaacgggtatccggtcattatccgtccagcctttacccttggtggcactggtggcgggattgccgaaaatgccggtgaactgagcacaattgtcaaaaacgggcttagcctatctccagtcggacaagtcctcgttgaacaaagtattgccggtttcaaggaaatcgaattcgaagtcatgcgcgacaaaaatgacaacgcgctagtcgtctgcaacatggaaaacttcgacccagtcgggattcatactggcgattccatcgtatttgcacccgttcaaaccttaagtgaccgtgaagtccaagcattgcgcgatgccgcacttaaaatcattcgcgccttgaagattgaagggggctgtaacgttcaactcgcccttgatcctaatagcgaccgctactacattatcgaagtcaatccacgggtgagtcgttcatcagcccttgcttctaaagcaactggctatccaattgcaaaaatggcggctaaaatcgccatcggtttaacacttgatgaaattcataatccaatcaccgggacaacctatgcgcaatttgaaccgatgctcgattacgtcgttgcgaagattccccgttggccatttgataaattcaacaaaggtgatcggcaactcggcacccaaatgaaggccaccggtgaagtgatggccattggacgcaacattgaagaagcattactcaaagccgttcgctcacttgaaattggcactgaccatctcgaaattccagcattgacggcagtcggtgataacgaccttgtccaacggattgtacatccccaagacgaccgacttttctaccttgccgaagcattgcgccgcggttattcaattcaagaacttagtgaattgacaaaaattgatcttttcttcctggataaactcagccacattgttgaaattgaagaacaactccggaccgataaaggtgacttagaattactcgaactcgccaagaaaaatggctttgccgacgctaaaattgccacaacttggcaaatcatgcctgcccaagtccgccaaatgcgccaagaaagtggcattcagccagtttataagatggtcgatacttgtgcagccgaattcgaatcacaaacaccttattactacgcgacttacgaacaagaaaacgaaagcattgtcagcacaaagccttcaatcttagtgattggttccggtccaattcggattgggcagggggttgaattcgattatgcaaccgtccactgtgtgcaagccatccaaaaggcgggctacgaagcaattatcatgaacagtaatccagaaacagtttcgactgacttttcaatttcagataaattgtacttcgaaccactgacactagaagatgtcctcaacgtcgttgaactcgaaaaaccagaaggggtgattgtgcaattcggggggcaaacagccatcaaccttgccgaaccactgaccgaaaatggtgtgcagattctcgggacaagcgtcgcgaacttaaaccgcgctgaagaccgtgaccaattcgatcaattaatcgccgaactcgacattccacaaccagtcggggcaaccgcaaccaatacgccagatgcgttgaagattgctgaagagattggttatccggtcttaatccgacctagtttcgttttaggcgggcgggcaatggaaatcgttcatactgcagaagaccttacacattacatgaaagaggccgttaaagtttcagtcgaccaaccggtcctaattgaccgctacttaatgggcaaagaatgcgaagtcgatgccatctgtgacggcaaagatgtcttaattccgggaattatggaacatatcgaacgcgctggtgttcattcgggcgattcaatggcggtttatccaccacaaaatctgacggatgcggaaaaacaagccatcatcacttacacgaccaagctctgtttagcacttgaatgtcgcggcttgttaaacatccaattcattattcaaaatgaagcagtctacgtaattgaagtcaatccacgggctagtcggaccgttccattcttgagtaaagtcaccggcatctcgatggcgcaactggccacccaagtcattttaggcagcacactagctgaattaaagagcccaaccggtctattaccagcgggcccactaattcatattaaagcacctgtcttctcattctcgaaactcacgcgggttgatagcttactcgggccagaaatgaaatcgaccggggaagtcatgggaactgacgtaacgatgcaaaaagcactctataaagcgttcgaagctagtgggatgcacttaccaagtcacgggaacgtcttaatgacaattactaaccaagataagacacaagcgctcgaattagcaaaacgcttccgcgaagttggctatcaaatcattgccacgcctgggactagtcaagaattccaagcagcaggtgtgccagtgcaatccgttgccaagattaatgctacgagcggcgatttacttgataaaatcaaagccggccacattcaactggtcatcaacacaaccggcttgaacgaagccccacaagtcgctaaagacagcatcgtcattcgccaaaccgccattgaacacggcattccattgatgacctcattggataccgctgatgcgatcttagcggtcctagaatctcaatcgctcctgaccaaaccactttaaaaccactaaaagagtctgaagccctttgcctaaggctcttttattacataaaaatcagaaggagtctgctaaatgttgccattagaataccaattaaccctcactaagcaaaccgaaattgcccccagtatctatgaattatgcctcaccggagacctcgcacagcaacccattgcaccgggacaatttgtcgatatcaaaatccccagtgacgcccttttattacgtcggccatttgggattgccaatgtcgaccgccaaactaacacgattaccttgttataccgcgttgttggtgaaggcaccacgatcttaagtgaatcaccggtgggcacaagcttgtccgtcttagggcctcttggtaacggttatccaattgaccaattagtagccggacaaaacgcgctaatcattggtggcgggactgggattccaccattacatgaactctcacggcaacttaatgcaaaaggcgttcacgttcaacacgtgttcggctttgcaactaaagcagccattttctatgaagatcactttcgcaagctcgggccagtcgcttatgcgacaaatgatggctcgtacggctaccaaggccatgttggtttattacttgatgcacagtttgctgatgcgacaacccgatatgatgccatttacgcatgcggaccaaaaggcttgttaatggccgtcgataatcgattcagtgagcatcccaatgcctatatctcattggaagaacggatggcttgtgggattggtgcctgctacgcctgtgtcaccaaactcaaacgtaatccaagcattcagctcaaaatttgcgatgacggacccgtcttcaaaacaaacgaggtgctcatttaatgacagacttagcagtaactttaccaggcttagctttaaaaaatccgattatgcccgcctccgggtgttttggcttcggtcaggaatacggtcgctattatgacctcaacgaacttggcgcaattattatcaaagcggcaacgaaagaaccccgacttggcaatgcgacaccacgggttgctgaaaccccaagtgggatgttgaacgcgattggcttacaaaatcccgggattgaagtcattatgcaagaaaaattaccctggttagccgagcattatcccgagttaccaatcatctccaatgtcgccggcaataccgaagctgattacgtcgctgtctgtgaacaaatcagccaagcgcccaacgtccatgccatcgaactgaatatctcgtgcccaaacgtggcccatggcggtcttgaatttggcacatcaccagaagccgctgccacgttgacgaaggcctgtgttgcagtcagccaagtgccggtttacgtgaagctctcaccaaacgtgacggatattcgtccgattgcgcaagcagttgaagcagcgggggcagccggcttctcattaatcaatacactggtggggatgcggattgatccaaaaacacgccaaccaattctcgctaatcaaacaggcggcttatctggaccagcgataaaacccgttgccatccggctcattcatcaagtccgttcaatttcgaaattaccgattattggaatgggcggtgtctcaacagctgcggatgcacttgaattaatggccgccggcgccaatgccatcgcagtcggcactgctaatttcagcgatccatttgcctgtccaaaactaatcgccgcattaccagatgaactcgctaaatatcaactaaccgatttaaaatcattcggtctaccacaggagggcactcatgactaaccctttaattatcgcgctcgactttccaaactgggaaacaacagatcgttttttagtgcaatttccaactgatgaatccttattcgttaaagtcggcatggaacttttttaccaagagggaccacagctgattaaaacgttaaaagcgcgcggctatcggatttttctcgacctaaaactctatgacattccaaacaccgttcaaagcgcgatgactgttatcggccaactcggtgtcgattacacaacgattcacgcagctggtgggcaggcaatgctcaaagcaggggcggctggtctgaaaaaaggcgccgcacttggcaacgtgcggcccgctaaactactagcgattacgcagcttacgtcgaccagcgaagcgcaaatgcaaaccgaacaactcgttaatgtcagcctaccagaatctgtcgcacactatgcgcaactcgcacagaactcggattgcgatggcgtggtctgttctgctcaagaggtgccaacgattcgcgaacacaccaatgctgattttctctgcgtcacacctgggattcggccagcaacaagccaaaccaatgatcaaaaacgggctgtaacaccacacgaagccgcacaagctgagagctcggcgattgtcgttgggcgcccaattacgcaagctacaaatccatatcaagcttaccaagctatcaaatcagaatgggagtctttcaaatgacaacaattgcacaccaagtcgcacaagccttaatcgatattcatgccgtcagtctcagtcctaacaacccttttacttgggcgagtgggctaagaagtcccatctattgcgataaccgtttaacgattggttatcccaaagtccgcaagctcattgccagcaacttagctgcggcaatcaaagcgcaattcccagacgttgaagtcatcggcggaacagcaaccgcggggattccccatgctgcatgggtcgcagccgaactcgacttaccgatggtttacattcggtcgaaaccgaaagatcacggtcaaggccgtcaaatcgaaggaccgtttaaagccggtcaaaaattagtcctcattgacgatttaatttcaaccggcgggagtgtcttacaagcagcggccgccgctcaaaaagagggcgcagaagtccttggtatttttggcatcttttcatacgaactagcagccggccaacagaatttcgcaactgctaacttaccactaacgaccttatcgaatttctccgccttattagcggtcgaagaagccgctgataacttaactccagaacaagctacatcactcaatgaatggcgccaagacccacaagcatggtcagacgcccattagaatagagtgttaaccggaaagtaatggcttgcagaacacgtttagcgtgtgccatcagccgcaccaatcaaagaagcgttaccccaattcactttggagtaacgctttttattagtcttgcacaggtttgttacgtagcttttgaacgagttgctcgtctggtgtcgtataaagtgtttgttgcccttcgtaaatcacaaaccctggtcgcgcaccgttcggttttttaatcttcttaacctgaatataatcaactggcacggccgctgataagcgcgccttcgagaagtaggccgctaagttgccggcttcttgaagcgtatcttctgatggatctgggctatcaataatcacatgagacccgggaatgttcttcacatgcaaccagatatcagttttatgggcttttttcaaggttaattgatcattttgatagttattcttgccaacgaaaatccgggtaccatcactcgcatagaaaacttcaggttcactaatcttgtaacgtttctgcttcttggcaccggttttcttagcctttaaataaccttcagcctgtaattcagctttgatatcctctaaatctttgggttcagcaatttcaatttgcgccataatcgtgttgaagtaggcaagttctgcttcggtctttgccatttgttcattgacgtaggcaattgaattccggagcttctgatatttcgagaaatacttctgcgcattttttgaagggctaatctggttcgacaaggtaatcttaagcggttcgttattgtcgtagaaattgggcaacgtgacttcagtcatgccacgttcgacttcccgcaaataggtggtcaaaatttcacccttaatccggtaatcatcagcactgtcggctgcttttaacgttttttgtagttttttcagtttcttttcatccttttgaatctcgttgcggatgaagtggatgagcgcaccaccttgttgctgcactcggtcacgctgcgccttgtgtaagtaatattggtctaacagctcactcaacgtgtcaaaatggctcagtgtccctgtcaggctctcataagggaaggccgtgaaccacgacttcttttcaccaactgttaacgttggtgtcacttggtcgaattgcttgaagaaatcagtcacaaccgccaaataattgtcatgatccattaaacgggtttgtagttcaacggcactttcacgactcatcccttggaagtgttgttgtaaccatttgacttgttcatcagcagcttcgttataataacttaaccaatcaagcgtctttaaatcagtcgtaaaaccatcaaccccggttgcagccggtggactaacataatcggcaccaggcattaagaaccgataacggttttgcgaaacaccgacgtgccggattaaatcgagaatcttattggtcgcttgattaatcaaaatcacattactatggcggcccatcaattcaacgattaagcatagttgttgtaagtcccccagttcattccgtgatttaaatgtgaatcttagaatccgatcactttcaatttgcttgatgttttctaaaatggcgccatctaaatacttccgtaaagacatcgcgaagttcggtggcgttgcggggtttgcataaggcacccgcgtcacttgcactcgcgcataagatgggtgggctgataggagaaggggataggtcttacgatttgcccgaatcgttaagattacttcgtttggataaggttgttgaattttcgtaattttgccgtctgctaaagttgtatttagctcatttacaacggcgtgggtcattaaaccatcaaaggtcattattgctcacactctctataattgaattgtcttacttattgtaacggttttgcagtggaacctcaaagaaattagttgtttgcaatcgctaacacgactattgtataatacaattatcaaattgctttatacaattaaagggggatttaccgtgcgctcaaccttagcaacgtttaatcaactgaatctattgtatcaagaacaaaagaaacactgggcgctacgactcgacttgaagttagcccaagtcaatattctaatggccattgaacccgatcaagaacgcatttcgcacgcagaattaaccacgttaaccaaactcgatgcatcgacactcagtcggcagttaaatacgatggctcaagaagggctgttaacaaaagtgaccggggctgatccgcgccaacgcgtttacgcattaacaccgaccgccaaaacggcattaagtacgttgcaacaacttcaaactgaacttgaaaatcacattcaacaaaactggagtaccgatgaacagcaacttttaaaaatcctactgaaccgttattatcaaagctttaatcgaccattaaaatgagacgccctatacatttttcggaaaatcggcatttttaggggaattaacctaccatttatgatatagttattaccgaataataaaaaagtaggtgtcaccatgaaaattgctgtagtcactgatagtaccgcttatctcacagaacagcaagtgaaagaccatcatctcttcgtcgtacctattccggttatccttgatggccaggtctatgatgaaggcgttgatataaccactgaagagttctatcaaaaattaaaaacatccgaaacattccccagtacatcacaaccaccactgggtgaaatgttaaaactatacgaagacctcggcaacgaagggtatgatgctgtcatcagcatccaccttgctagtaccatctctgggtttgtcacgacattgaaaaatgcggcaagcaccatcgataacatccaggttgtcccatacgattcagggattactgtgatgttaatgggctacttagcaatggaagcggccagaatggcacgcgacccagaagtgaccgtcgaccagattatcgcacgccttgacgatctaaaaagcacaatggatgaatgtttcattgttaacgacttacaaaacttagtgcgtggtggtcgtttatcaaacgcatctgcttttattggtagcatgttgaagattaaaccgcttttaacgtttgacgctgacactaacaaaattacggcatttgagaaggttcgttcattgaagaaggcttacgcccgcgctgaacaaatttttgctgaaacagccgaacgtgttgactatccattacgcgcactaatcattcacgctaacgatgaaccagcagcgattgcatggcgtgataagcttcaagcaaactatccagacttaccaattgatatcagctactttggcccagttatcgggacccatcttggtgaaaaagccattgcacttgcttggattaaagattttgataaagcctaatttaaaagcctgtcgaacaattcgacaggctttttttgtgacttataagatagaaacgggttcttctaaggtaaccaacttcgtcccaattagcttataaataacggatttaacggctactttttgaacaatgttgagcggttcctcgtttaaattgaattcattaaccgttgattgcgcgttaatattcgcaatttcggcattaaataaccgcacaaactgatcatatgccttaccagcggtgtcgtttgccaacgattgcgaaatcccttgtttaatgacatcgagcgggaagactaatttcataatgctgaccacaatcaattcggctaaatgatcccgattatagcgtttcttttccggtcgttcaataatcgccattttgacatagctattaatcattgttttcgttattttaacgtccaacaaaggactcagtcgtttattgacctcactaatgacttggtccatatagaggtctaaatctggaaattcagaccataatggtaaccgcaattgttgaaagtcacccaaccatttttcaaattcttgtgattgcatactgattaacgccaccaatctgttgatagtatatttattatgccatagcaattatcatttgtcactaacatagaatcgaattctattatctattgacttataatctacattcgcgctataatactcggcaaatagagaaaaagaggcgagaaccatgcaactttccacgattaaacgacaacaactgatttatgaaatatggaatgccattacccacgggattggttttttcggtagtttaacgttagtcatcatgctcctggtcaaaagcattcataaaacactctcaccagtcgcgattgctagtctagcagtgtatggcgccacattactgctactgtatctcgcttcgactttatttcactgcttagcatttaccaaggccaagcgcgtgtttcaaatattcgaccatagcaatattttcttgctgattgctggtacctacacgccatattgtttgatttttattggccatgcaacaggaattagcttactgattgcaatctggacactagcgattgccggtattataacgcacattttgagccacggtcggtaccaaaagattgaaacaacgatttacgttgtgatggggtggttatgtttattagctggtaagaccctttatgtcaacctcagtccagttggtttttggctgttagtcagtggtggcgtagtctttaccgttggcgctctaatttatagttttcctaaaattcctggcttacatttgatttggcactttttcgtaatgctcggaacgaccctgatgtttttttcaatttacctcaacatttaacttgaaggagtacaactcatatgacaattaaaattgtaacggactcatcgattcaactgacagcagacgaacgcgccaaatatgacattcacatcgtccccttaacgattcaacaaggaaatgagtctttcattgatggacaaaccattacccgcgctgaatttttaagtcgcttacaaaatgcaacgaccgattttccaacaacaagtcagccaactgtcggcagtttcgtcgatttatatgatcaattaggggctgatggtagtacgattctatcgattcattgtaccggcttgttaagtggcacaatcgaaggggcacacacagcagcccaccaatcaacaagtgacgtacacgtgattgatagtaaagcaatcgaccgtggacttgcttatcaagtggttgctgccgcccaagacgttgaagcagggaagcctcttgatgatattatcgcgcatctcgatgacatccgtcgtaaaaccgaaacctacgtctttttagattcacttgacgcgcttcaacgcggtggtcgaattagtagaatggccgggctattaacgaaaatcattaaactcaaggtaattgtgcgcttaacagatacggaattagaagtcgtcacaaaggggcggggactaaaagcttttacaaaagaaatcaacaatatccgtgaatacttagccacccaagacgttgcggaaatcggcatctcacacgtcggaatcacggatgaactatccgctaagatccaagcaacgcttgaagaaacacagccccatgtgccttatacagtcgcactaaccagcccggtcattatgagtcacgttggcctaggggcgtttggtattttctatcggacaaaataacagctgacaagaacgtctcattcgaggcgttcttttttattgccccttaaaattgcgcaaaatctagttgcgttatttcaaagaatcgtttatattagaatgaacgttctaataagagaggagcatccagatgcggacaaaaacatttgaagcaccggttgtcttagacaaagccatgcttgtcttttggcaacaaggctatgagaatacctcaatgcaaaacctagttgatgcaatggggattcaccggcgcagtatttacgatacattcggcgataaacatgaactgtttatccaagtactagcacattatcgtgaccaaattaacgagcgtttcgagcaagtactggcaacacataccaatttaaggtcgcgcttaacagccatttttgaaatatttattgaccatccggataaccaaccagccggctgcttagtggtgaataccgcggcaacgttaaattcattagaaccagacatccaaacgctgattcagcattatttaacccaagaaaaagcactgttgcaggcattactgattgccggccaggccgaactagaaccgtctgttgcaattgatcttttagctgcatcgcttcaaagtgcgctcattggtatccgggtcatggctaaagtgaacccagattcaactacgctaacagcaattgtgcaacaaaccctacaaacactcccgtggaaagaggttttctaatatgaaagcagctcaaattaaaaaatataatcaaacactagctgtcacgattcaagaaattgatcgcccacaaccgctagccaatgaagtactcgtcaaagtcgcctatgcagcggtgaatccattggatccaatgaatatccgcggcgatactaaattaatgcaaaactatgctttaccactgactttaggcaatgaaattgccggtgaaatcacagcgattggaacagacgtcactgatttcaaagtcggggatcaagtctatgcgcgtttaccattggctaaaatcggtggctttgctgaatatgtcgcggttaccaccgatgcaatctggtacacgccaaaggatttatcgctacgtgaagccgttgcaatcccactgactggcttaacggcttatcaggggctatttgaggaattggcagcccaaccgaaccgaacgctgtttatccctggtggttcaggcggtttcggtccaatagccgtcccaatcgcaaaatcactaggcttaaccgtgattgtttcaggcaatgcagccacgcgagatcacattttgaatttgggtgctgaccaatatatcgattacaaaacaaccgattactgggaagtttttgatcaaatcgattacgtgattgatacacgcggtggagcagatattgaacgtgaaatggcgattatgaagccgggcgggcggattttaagcttgattgccggtccaaacaaacaattcgctaaacaattgcaattaccattttggaagcaactcttattctcgttggccgggcggaaatgggatcgcctcgctaaaaaagcgggcgttgaatatcgctttattttcgttcgttcagatggtgcccaactcaaaaaaatcactgaaattgttgaacaacaagcgattgtaccagccatcgatccgcatcaattcgatttagcacacgttaaagaggcactagaacttgttgctcacggccatccaactgataaagtggtgattaaggttcaagcgggctaatcaagatgacttatctaacaacccccaaccaatttattcaagatcaacaaggccaacggtttgcttaccgcgaagtgggtaccggtcgcggcttaccacttgttttattgaatcacttatcagccactttagataactgggaccctgcattaattgacctgatcagtcagcaacgacgcgtgattgtctttaataatcgtggtgttggtttctcggatggcaaagtccccacgacgattgagcaaatggtagctgattgttatgcttttataacagctatgcagctcactcaattcgatttacttggattatcgatgggtggttttattgcacaggccttcactttaaaatacccctcaagcgttaatcacttaattttagtcggaacaggtccccagggtgactcagaaatcgccaaagtggggcgcataacaacttttgacttaattcggtccttcttaacgcatagagacgttaaggaatacctcttcttcaccagaacgccccaaggcaaacaggctggtaaagcgttcattaaccggttaaaacagcgtgaaattgttgaagataaagccattacgttagccacttatcgtcgtcaattaatagcaattaaacagtatgcgcacgatcaaccggcaaacctggcacaaattaaccaaccaacattgattgtcaacggcgatcacgatcgaatggtacctgttaatggttcatatgaattacatgaacggattttaaattcccaattaaaactttacccagatgctggtcatatggcgttattccaaaatccaaatgactttgcagctttgttggctcagtttttaaatcactaattacagaagcgtcattttaatatggcgcttttttgctgcgcttaaacgctggtgacgagtgggtaggcttagttaattttttaaatctattttagtttacataatatatattatgcgaagaaacgcttatcccttgaaagagcgctaaaataaccacttattatccaacatcattcaattgatttgatgaaccgcacttaacgcgtttgttttttacactgcacgattcataaactattacaagttactcaacgccaatatgatgaatcaaactgactggccaaccgatatcgccaaacttaactttaaatgcagaattcatctaagctcaggcacaaatccgtgattaatctgacgattatgccagattttaattggtaaatacgcatattaacacatcttagccttaaaactcacatatcaaatcgttaaaaaaggccttaaacgttgatataccagcttttaaacggaataaggatctttaggttgctatgcagatagtcgaataagaccatctgatcatcagtttgcggaacggtttgcaatacaagtgttgttaaaattatggttttaacaacacttgtagtattctcacctcatttttgctaaactatctttaaactgctaattaaggagtcttccatcatggatcaacaacgttacttagaactctgcgaaaagcaactcgccaatcttccggattacattcgtaaattctacattaaccgccaggcaaacgcctactcttctgcaacgctctatcaatacttacaagaatacgttcgctttttcacctggttagttgatgaacagatcgtcgtggtcccctctatcgaccagatgccactgaccgcactcgaaaaaatgaaactcgaagatattgagctctacaagatttttctaatgaataagcgtaaacaaaataaccataagctctcctttcaagccgttaaccgctcgattaacgcattaaatgcgctctggtacttcttaaccattgaagccgaacaagctgatggtgagccttatttttaccgaaacgtcatgaagaaggtgaaactacttaaagcttcagaaacaatggcgacacgttcacgacacatcagcaaacaactgctgaccggtgaaaagaaacacgacttcatcaccttcatgcaagttgattaccctaacttgctttctaatcgccaactggcatcatacaagcaaaattgcgaacgcgatattgccatctgtgtactggcgctggcaacgggcatccgactatcagagttggcccaagccaacatcaacgatttgaatcttgaacaacttacaattaccgtgatccgtaaaggcggacagcaagatactgtcccaattgctccgtggagtttaccttttttaagggattactgccagattcgtaaatcacgctatctaaaagaagataatgaacaagccttatttgtcagtcgctatcgtggcagcgccaagcgtatgagcaactatgccattgaaaagttagtcgcgaagtattctgaagcatttggcgtgcgtctcacaccacacaagttccgccatacacttgccactgatctcatggcggcaactcatagtgaaacaattgttgcgacccaactaggccaaacgaccacgcaagctactcacttatatacgcacgtcgttgctgatgaacaacgctcggcaatggaccagcttgaatagccactattagtgctcttcttggcaacgattatcaatgtcgttctaacagtcatttggtttacatcaattcgtcgatttacacattgcttgacttataccagctatcgagtatactgaaagcgttcttaaaaattaaatgttaaccatcgcaaaggggagccattggctgagagtgattttaatcagacccttcgaacctgtttgttaagacaagcgtaggaattgtgatggagttgaaatgataactccttttttgtgttggttgaacaagaaaaggggttatttttatgcaacatcagcgtctattgattcagattgaaggggcaatcatcgcggcatttgccgtggcattggaatacatcccccatacagtggggccttccgcaatcgaagtctcctttgggattatccctattgtaatctacagtttacgccgtggtgccattcctggaatggtctccggcttaatctggggtctactagacttaatcttacgtggattaggaaacggtagtgtcttgaacgtatggcaaggattgctagaatttaccattgccttcatggttgttggtttagcaggtatcttacaacgacctattcaagcaagtattcaaaatcatacaaaagtcaaaacgatgacccttttatggatggccgcattttttggtacttttgcaaaatacttctgccacttcttagccggtgccgtttattggggctcatacgctcccaaaggtatgaatgcttggctatactcgctcactgttaacggtggcagctttatcgctagcttcattctaaccggcatcgttctatgtatttgtttagccatggtgcctaagttatatttaccaaaagacatggttttacacgtacaatctgaaaaataaacaaaaaaagagccgtattaacacttgaatggtgttaatacggctctttttaattcccttaacgatccgttctagctcgtaatgcatataagattgaaactgtatcgacaacctcttggaataaagcccccactaatgctggaacaatcccggtgctggcaatcaacattaacccaatacagattgcaatcccaatcaaaaccgcctggcgagcaacgcgcatcgtgtcacgcgcgatttgaacggcacgactaacccgtcctaaatcatcttttagaatcaccacatccgctgattcacttgcggctgttgcgccatgggcccccatcgcaatcccgacatcagcacttgccagtgacggtgcatcgttgaccccatcaccaaccataattagtgggcgttggtcttgcggtacttgttcaattaaatgaatcttatcgactggtagacagcctgcatggacgtcatcaattccgacttgttccgcaatctggtgcgcagttgtcgcttgatcgcctgtcaacatcatcaaacgcgtaatccccagttgatggagcgtctgcatcgtggccggtgcttctgatcgtaaatgatcgataaacgtaatgtaccccgcatattgatcattgatcgcaacgtaaacagtggtttgttcttgcagaggctgttgcgcatctggcgtcacgaattgatgtttcccaacacgaaccgtttgtccagacgacagcgtcgcaactaccccagcgcccgttgcttcttttaatgtttcaattggttgtaattgttctacctgtgccgctttaacaagtgaccgtgctaaaatatgcgaagattcttgctccgcactagccgccaattgcaataaatcggttggtgcgataccaatcactggcacaacttggtcaaccgtcaattgaccattcgtaattgttccagttttatcaaacgctgctgatttagcagacgctaatttttcaattgttgtgccagccttgacaataatcccgtttcgactagcacgactcatccctgagattaacgcgataggcgctgccaatattaatgggcacggcgaagccacgacaagcacttctgcaaaccgtactggatccttagataaccaccaagctactccagcaatcacatacgcaactaatgtaaatggcacggcatatcgatcagctaagcgcacaaaatgcgctggttgtgccgcagaggtctctacaagccgtacaattgcttgatattggctattaacggctaattggtcaacttgcatggtaaccgacgtatcgccgttcacagagcctgacatgagctcatcatttagtgctttttcaacggggcgtgattcacccgttaacgatgattcatcgaataaagcacttcctgcaataatatgcccatcaacagggaccaattcgccaggtttaataatcacttgatcaccaacttgaagcttatcgactgaaacatcttcgaccgcatcattaacaaggcgatgcgctgtttgcggagaattatcaagtaatgtctttaactcacggcctgctttatgcgctgcatagtcttccaatgagtcgccaccagttaacatgaccaagaccattaatgctgcccaatattcaccgaccgctaacgtcgcaataatagcggtaatcgctaatagatccaccccgtattgaccagattttagcgttttaatcatctcaataaacatcgagagcgctactaagctccccgctaaactcactaaaatctgtgcccacaatggctcatgtagcaaaaacgccaagcatagcgcaatcacacccacactaattgttaaggcaaacttgatggtatgtttcatcgtcaatcgctccttcttatgaattcatttacattataacacatttttagttagattagaataattccaatctggtggcacacaaaaaaagccccccaaattaatgagggggcttttttgcagatagttggtttataatagcagtctgcacggcagtcatcgctgctaataatagagtcattcgttttatcacgggtgatgtttttttttgattagagagtgctttttcagttttatgaataatcgattcaatcggggcttgtgcctcgactaaggcttcgactgttatgtctgtgtacccgttcaataaatcacgaccaacttctaatgcgtaaagcctattttttaataaagtaaattgagccgaacccgctacaaacttcagctgactcttttggcaatttcgaattgtcgcttcaatcacttgaattgcatcaatgctttcctcggtcatttacctatcctcctaataaaaaaataaagccccgaaggactttattattaatcgttattaaaatgcttctgttaattgtggaaccacttgtttcttacgtgaaacaacaccggctaattgtgcacgatggttgttcaattttacgttgaatgctttttcaaaggcttctgctggttcaccgataacaagcgcttctgagttactgtttaagatgtcagtaatcaaaagtacgaataagtcgtaaccattagctttattgtctgcttcgatagcagcttcaaaagcagcttggcgtttgaagaccgcttcgatatcaactgtattcacttgatcgatacgcacttttttaccagccatatcgaatgttttagcatccgcttcaattaattcagcttcgctcttatcatctaagttagtgcccgcttttaacatttcaagaccatatgattcgaaatcaatatcagcaatttcagccaatgtcttaatcgcaatccgatctttttcagttgttgtaggtgatttcatcaacaacgtatctgaaatgatagcactcatcattaaaccagctaattgagctggaatttcaactttgttttcgttgaacattgataataaaattgtgctggtacagccaactggttcagcgcggtagaataatgggctgactgtttcgaagtttgcaattcgatgatgatcaacaacgtgcgtcactgttaaatctttgatatcggcaacactttgttggctttcgttatgatcaaccaacatcacactgtcaacttcactgcttgcttctttaatgatgcgaggggttgctgctgcaaaatgacgcaatgcatagcttgtttcttcattaggttcacctagcgcaacggcttctacgtcgtttcctagttgttgttgaagataagcaaacgccattgccgcaacaattgcgtctgtatctgggttttggtgaccgaatactaattctttactcatatttatacagaccttccttttaaaaaaataacatcctaattataccaaaaatattagacgattctacggttttgctctctaatccgtgttaaataatctttttcttctaaataatggtcgaattcacggaaaaagctattaatccgtggaatatcttccttttccttgcggaagacaaaagctaattcgaactgaatggccggatcaaattgaaccgcgtttcccttaagtcccaaattatgtgcttcataaaaactctttggtaaagctgtacttaattcagttgcttcagcaaaacgcatgatttcaaatggtgatgtgaattgagccgcactcactggacgatcaaccaattgattcttataggcttcactgatgaattgatttaaatagtattcatctgggtatgtcacccatttattatctaatgtatctttaaaacggatcttcttacgcgtctttaaagcaggatcttggctgataaagagtaagcgttcatccacaatcttatgtgacttataaggtttccagttcttaatgctgtcatctggcaaatacataatggcaatatcaattttattattttcaagtcggtcccagatttctttccgagtcaataagtgcatgctgacttcgatgtcaggaaattgtttatagtattgaattaagaaggattggataacactgatttccatcgatgctaaaatcccaatattaatcttaccgcgcgtcgcactcgttgaactttgaatttcatccgtcgcagtatttaataaatcatgaatctgatgggtagcatccaacatcgtccgaccagcatccgaaatatgtaacttcttgccgactgaataaaataaaggcgccccgactatccgttctaattttttaatctgttgggttaaagcaggttgcgtgataccgagtagttgtgccgcttgggtataattcatcgtttccgctaactgtaggaaataggttaatgttttagaggagaagatattttcttgtcttgttttcattttcaaatctccgttctttagtttacgcctatcattataataataaagatataaaaaaagagcaacccctttcgttgctcattcttattaaaggcttaaaattttcttatgttagcgttgctgctttggatagtctgctgtatgcaatagacgctccgcattgacaacgcgatcgtgggtcggtggttcaatccccgctaacggatatttaatccccatcttttcgtatttcacgattcccatcgtatggtagggcaacacttcgactcggtcaacattgtttaacgtttgaatataatcccctagacgagtgagatactcatcgtaatccgtccgttctggaatcaagacgtgccgaatccacatatgatgaccatgatttgacatatattcaatcatttctaaaatatgttcgttagaaaagccggttaactttttgtgccccgctggatcaatatgcttaatatcgaccattgaaagatcggtatatttcatcaattctttgaatttactaaagaagggttctttatacgtaaacggctgcccacaagtatccaaacaggtattaatcccttgtgccttacactttttaaataaatcaattaaaaaatcaatttgaattaaggattcaccaccgctacaggtaattccgccatctttaccccagaaggccttatatggcagtgcctttgcgattaattcgtctgcggtataagcttctccgctaccaatattccacgtatctggattatgacagaattcgcaacgcatgcgacagccttgtagaaaggcgacaaaccgaattccgggaccatccactgaaccaaatgtttcaatcgaatgaacatatccaattggcacctctggtgttatcggggtttctggaacaacattttcagttgataaccgtgttgtaaatttaattgccatttcactttcacctcttaaaagaaaagctatgctttctggtaaagtcgttaattcgcgttaacgaccttaccagaaagcggatattgctatccactttcgttagattacatttcgtcaaagaacgttcttgagataacgtcgtcttgttgttccttcgttaaatcagcgaagtagacacaataacctgaaacccgaaccgttaatgttgggtattcttctggatgttgttgtgcatccattaaggtttgcttattgaagacgttgatatttaaatgcatcccttgattaatcatgtaaccatcgaccatgttcacaagcgcgtctttacgtgcttcatcatcatgccctaatgtatttggtgtgacaccaaacgtatttgaaatcccatcagttgcataacggtatggaatcttcgcagttgaaagtaatgatgctaaagcaccgtttttttcagcaccgtatgctgggttagcacctggtgagaatggttcgccagcttgacgaccatttggtgttgtcccagtattcttaccatacacaacatttgatgtgattgttaaaacagatgttgataattttgagccacgatataaatgatgcgtattcatcttcgtatagaaagtcttcactaaccatttagcgatatcgtcagcgcggtcgtcattgttcccataacgtggatagtctggattttgcgcttcgaaatcgactgccataccgtcttcatcacggataactttaacttggccgtatttaatcgctgagattgaatcaaccgcatgtgatagaccagaaataccagtcgcaaatgtccggtctaaacgactattcttcaatgccaattgtgctgattcatagtaatacttatcatgcatgtagtggatggtgtttaaagcattaacgtaaacgtctgctaaccaatctaacatcttatcgtatttacccatgaattctttgtaatcaatgatttcacttgtaattggttgataagctgggccgacttgagctttgcctaattcatcgatcccgccgttaattgcgtaaaggattgtcttagccaagttagcacgcgcgccaaaatattgaacgccgtctgcaattggttgtgcagaaacacagcatgcaatcccataatagtcactcccccattcattacgcatcaaatcatcgttttcgtattgaatcgttgaactcttaattgaaacttctgttgcatagcgcttgaaaccttctggtaagcgatctgaccaaagtaaggtgatattaggttctggagcagcacccatattttccaatgtcttcaagatacggaaggcagtcttagtgacatgatgacgaccatccataccaatcccacacattgataatgttgcccagattggatcacctgagaataatgaattataatcttctgtccgaatgaaacgaaccatccgtaacttcatgacaaaatggtcaaccatttcttgcgcttcagcttctgtaattaagccccactctaaatcacgttggataaagatatccatcgttgtatcaatccggccaactgacatcgcagccccgttttgtgtcttaatagcggctaagtaaccgaagtaaatccattgaattgcttcttgggcattcttagcaggtcttgaaatatcaaagccatagctagcagccattttcttcatatcttgtaaagcacgatattgttcattgatttcttcacgaagacgaatgacatcgtctgtcatttcaccgtcgccaacaccattaaagtcacggactttttcttcagctaaacgatcaatcccatagactgcaatccgtggtaagtcaggaataatccgaccacgtgcataggcatctggaaggcccgtaataatcttgtagtgacgtgctttacgcatgtctggtgtataagcatcaaaaacaccttgattatgtgtcttgcggtattcgttaaaaatcttgtgttgttctggatcagtcttaaagccgtatgcttccaaggcatcttcggccatccgaatcccaccaaatggcatgaatgcgcgttttaatggggcatcagtttgtaatccaacaatcttttcaagatccttgtttaaataaccagggccgtgtgacgtaactgttgcaggattatcattgtctgcggctaaaacgccacctgcttcacgttcttgtttcttcaattccattagttgatcatttaacgttgttgttgcttcggttggaccagctaagaaactttcatcaccgtcataggcagtaaagttttgttggatgaaatcacgaatatcaatttcatcttgccagtcacctttgttaaagccgtcccaatagtcggctaagttaattttttcggtttttaccatgtggattacctccattagtcaagtgttgtttatcacagttttcacaattttagtataacacatcacatagtttatgcaagccctttctttttgattgtttagaaactcttaaactcttttgaaagattgatttatagctatttatctacttaaaatatttttataaccccaccatttaaattgtgcaaaacttattttgctgttatagtacaaaaccaaaaaatccgcatattatgtataacagaaaaaagcaagtcatcacatagatgacttgcttttttattattttgactcgtcttcatttttaactggaataggcgtttgaacaaatgccggttgtccaacttcatcaacatccatcacaaaactaccgttcgaataacggtcggcagttgcatgttgataagggttaattgcaatcacttcttgctgatcagtatgaatcagtaactcgcttgcctgctcaacactaaccattgctgctacccgatgtggttctttcttcaattcacggagaattaagaccccacgacgcgcacgacttgttaaaccaacctcacttaagagcatccgtttaaaggcgccccgttgcgtcacaatggcaacggctgcatgtttatcttctggatgatataacgtaaagccgatgacaacatccccatctttgagatccattaatttgaccccactggccttagcacctgatacagagacttcagataaggtaaaactcaatccataacctttatagctagcactaaagacggctagcccttcatcacttggaatccagttcacgtttgtcacatgagcatctgcatgcaacttaataaagtcttgtgccttagaacgatatgttcgacttggcaagaggtcagagaaggcagtttgtttaatatagccatcatccgtcccaatcacaaagtagccagcctgttcatttggcttaaaggcaaatgctgcaataatcgcttcatcagccgccaaaccaatcgattgcgaaatatgttcgcccatttccttccatttcaaatcagcaatttcatgaactggtcgttgaattaaatgtccgtaattggtgaacatcatcaattgatctaaggtttgtagtggcttttgtaaaatggcaaaatcgccgtctttcaaaccgctgtcggccccttcagatgcttgatacgagcgcaaactactacgtttcaagtagccgtcatggctaactgcaaccatgacggtttcgtcaacaacagtcacacttgtatcaatttcaagcgtctcaatttgtgcttcaatttcagtttttcggtcacttcgataagttttgaccattgcttttaactgcgccttaatcacccgtgcaagtgcttttggatcaccaagaatcatccggtattccttaatcgctgcatcaagttcagctgattcttgttccaaagcagtcacatcggtattcgttaaccggtataattgcagtgaaacaatcgcttcagcttgggcttctgtgaaggcgtagcttgccactaaattatctttagcgtcttttttattcttgctaccacgaatcgtcgcaatcacttgatctaaaatcgagagcgccttgattagccctgcgacaatgtgctgacgatccaatgccttttgtaaggtatattttgtccgccgaatcacgacttcttcttgatgttccaagtaggcatggaggatttctaataagccaacctgtttaggttgcatatgcgagatggcgaccatattaaagttatatgtgatttgcagatccgtatttttgaacagataattcaagatcccttgactatccgcttgctttttcaattcaacaacgactgataagcccatccgatcactttcatctcgtacttcagcaatcccatcgaccttctttaaaacgcgtaattcatcaatcttcttgaccatcatagccttgttgacttcataaggaatttcgctaatcacgatttgttcccgattgccgcgtaattgttggatgctggtttttgcccggacgacaactcgaccgcgaccagtttcataggctttcttaatcccatcgaccccttgtaagatcccaccagttgggaaatcaggtcctttgatgaaggtcatcattttttctaacgttgcatcgggatgatccaatagatagaccaagccatcagtcacttcacctaaattatgtggcggaatttcagtcgcgtacccagctgaaatcccagttgccccattcactaagaggtttgggaaccgagctggtaaaacagtgggttcttcagcggtatcatcgaagtttaaaacgaaatcaaccgtctttttatcgatgtccttgagcatttcaccagcaatcttacttaagcgtgcctcagtataccgcattgctgctggtggatccccatccattgacccattattcccatgcatttcaatcagtggttcacgtaatttccagtcctgacttaaccggaccatcgcttcataaattgaactatccccatgcggatggaaattccccatgacattcccgacagacttcgctgacttccggaaccctttatcataagtattcccatcgatggacattgcgtataaaattcgccgttgaacgggttttaacccatcgcgaatatctggtaacgcccgctcttgaatgatgtattttgaatagcggccaaagcggtcgcccatgacttcttcaagcgttagctcttgaattttttgtgcttcatcagccaaatttaatcactcacttttctattcgtctaattggtcaaataaatccacttcagcgcttgaagttgtcggtgctggttgaccattcgttgtatctaagatgctaccatcttcagccattgtgaacttaacgttttcttcaatccacttccgacgtggttcaactttatcgcccatcaacgttgtgacgcggcgttcagctaaggctgcatcatcaatccgcacccgaattaacgtccgactcgttggatccattgtggtatcccaaagttgatcagcattcatttcacccaaccctttgaaacgttgttgactgtagcctttacccatttctttagcgacgactttcaattcatcatcagtccaagcataggcaatcttcgtttttgccccagcacctttttggagcttatacaatggtggcaaggcaatgtagacttttccggcttcaattaacggccgcatatagcggtagaagaaggttaacaacaaaatttgaatatgggccccatcggtatccgcatcggtcatgatgatgactttatcgtaattgctgtcttcaagtttgaattcagccccgactccggccccaatcgtgtaaatcatcgtgttgatttcttcattttttagaatttcttgtaatttcgctttttgggtatttaaaactttgccccgcaatggcaaaatcgcttggaatttccgatcgcgcccttgcttagcagaacccccagcagaatccccttcgaccaagtacaattcattcttcgccgcatttttcgattgcgctggtgttagcttcccagataataagccatcggatttcttctttttcttaccatttcgactttgttcacgtgctttacgcgcagcttcacgtgcttcgcgtgcttttaatgatttacgcactaaggcttgcgcaaattcaccattttcaagtaagaaaaagctcatttgttcataaaccaaactatcgacagctgtccgcgcttgtggcgagcctagcttacccttggtttgcccttcaaattgcaagagttcttctggaatccggacagacaagacggcactaagaccttcacgtacgtcggagccttccatgtttttatcccgttctttgagcaagtttaccttgcgggcgtaatcgttaaaagctttggttaagccggctttcatcccagcttcatgggtcccaccatcacctgtccggacattattcacaaatgacatgatgttttcggagtagccatcgttatattgacccgcaaattcgacttcaatgtcttctttggtgccttcgaaatataacttattaccaatcgtatctttatcttcgttcaaataatcgacaaatgattgaatcccttctgggtaatggaagacatcttcacgtgctggctcagcgcgtaaatcggtcaacgtaatcttgacatctttgagtaaaaaggcagattcgcgtaatcgttctgctaaggtattgtagttataagtagtcgtttgaaaaattgtcccatctggcttaaacgtaattaacgtgccgtttggttctttagctttgccaacttttttcaaggtaccaaccgggtggcccccattttcaaagcgttcttcgtaggcaacaccatcacgcacaacgcggacggtcaaccattcggataaggcattgacgacactcgcgccaaccccatgcaaaccgccggatgttttataactgttttgggtaaatttcccacctgcgtgaagcactgtcaaaataacttcaatcgtaggaatcccagattggtgcatcccagtcggcatcccacgaccatgatcacggacactaatactattatccgcgccaattacgacgttgatttctgaaccaaaaccagccaaggcttcatcgacagcgttatcgacaatttcgtacaccaaatggtgcaagccgcgaccgtcagttgagccaatgtacatgccaggccgttttcgaactgcttctagaccttctaagacctgaatcgaattatcattataatcttgtttttgatttggcattcaagtatgactcctttgtttaaaaatgaacagataaggtatattatcaacaagtttggatgattttacaatcaaaaatttaaaatttcttgccaatacaaatgtatgttcgtattcacctattctaacatacaatattccttttcccttgtcaaaatgctaaaataggggaaacaaatgccacaaataggagtttttgtcatgaaacttagtcttatctttattcttgcgtacctgatcggttcgttcccatcaggcgttattatcggccgcgttttctgtcacaaagatccccgagatgctggaagccataatatcggcacaactaactcgtatcgcgtgctcggcccaatcgctgggacagccgttttatttcttgatattttaaaaggcacacttgctgctagcctaccgatgatttttcacatccccaatcatgcattggtcttaatcgtcggcttagcggccgttgtcggtcatgcttactccatctttttacactttacggggggaaaagccgttgcaaccagcgcaggcatcttactggcatacaatccacttttcttcgtaattgccagtaccatctttatcagtgtcatcctgattacaagtatggttagcatggctagcatcctcggtccattgatgattgcgattttatcgttttacacgcatgattggctactcggttcgattgcgaccttggtcttacttttcctggtctaccggcaccgcgaaaatctacaacgcattaaaaatggcactgaaaacttagtgccatttggcctgtactatcgctataaacaaaaacatcaataactaaaaaaacgccgaacgggcgtttttttgtgcaatcagttaaagatcaatcaattgttcccgttcattgtaaaatgatcgataagctaagtaacacgcaatcactgaaccaagactcgttgccgataataacataaaggtcactaatatctggtacataatggccttgactggatcaattccggcaaaaatcaggcccgacatcatccctggcaggctgacaagccccatcgttttagcggaatcgatcgtgggtgacatccccgtacgaatactctcacgaataatggcaattgatgcttgtttagcggtcgctcccaaggcgagtcgttccaaaacaggttgccgttcatccttaaattgcgccagtaagctgcggtaactcaagccaatggcgaccatcgagttggaagcaatcatcccagtaattggaataatttgcgatggaataaacttaatcgccccagataaaacaagtaatcctaacgtgaccccagtacttgttaaaattgcgataaatgaaattggaaacccgttgcgtagtttccccgcccgctttttggcatttgctgcggcgttaaaaataatgatcagcatcatcaataacgttagccacacatcgttaatatgaaaaatgaatttcagtaaataaccaacgataaataattgaatgattgcgcgaaaaacactgataatcatatctttttcaagaccgattttttcatggaagctaatgactaatgcgacaaacactaatgtcacagcaaacgtcagtgaaagaccattaacggctaagttcatcttgatttaccaattcgccagcaacaatttgcacctggcgccctttccgttgtaattcttctgtatcgtgggtaatggcaataattgtgagcccgcaatcctcattgaggtgctggacaaacgccaatacaattgccttattagcggcatctaaaccagtcgtaatttcatcaagtaataaaacttccggtggaaataaaacattacgaatcaaggcaattcgttgcttttcaccgcccgataacgtggtaatttttttcgttagtggcatgttggctaacccaaccgctgccaacgctttttcaattgctgccatatcgaccggtaaattacgaatctcgtatggaaaacgtaaattatccccgattgtttcaccaaataacgttgcttgttgaaaacaatacgaaaccttttgtcgatactgattgggactaaactgggtcagtggctgatcatttaataaaatggtgccacgtgtcggcgttagtaagtccgcaattaaccgtaacaaggtactcttaccacccccagaaggtcctgtaatcgttaagtaactgcctttttcaacggttaaattaatgtcggttaaaatcacttgttgatcaacctgataagataatcgttcgatttttaattgaatcataagtccctcctgacaattatttaattcatagtatacacgaaattcacttaattagtgtcttctgctgattgaaaaaaggacacctaaaagcttatactaatattaggatatattaagtgatggacgttccgtccgctctggaaaagagatgttgataatgttaaatagctttccgcaagtcatgacaattgccggttccgattctgatggcagtgccggtgcgcaagcagatttaaatactttttttgcccgtaatgtttatggtatgagcattttgacagcctgtgttgctggaaattcatatgggattcgtgctagccaagcactgtctcccgactttattgatgccgagtttgaagcaattgcagccgactttcaggttcgcgcttgcaaaacaggaatgttaaccgaccgtgagaccattctaaccgttgctaatcagttgaaaaaacatgactttggtcccctagtgttagatccggtcattattaccaagcatgaagcattgttgttggcagatgatgcttttaacacactaaagacagaattaatgccccttgcaactgtcctaacgcctaatttctacgaagcgcaaaaattaactggtattgaactgaagacacctgctgatttccaagctgctggccaagcactattggcaatggacgcaaaaaacgtcatgattaaaggccatcacgaggccggacaatcaatcgttacagactacgtttgccttgccgatggacaagaattttggctatcagaaccttacgttgaaaccacccatattaatgggacgggcgattcactttcagcttgcatctgtgctgaaatcgctaagggacagacaattgaggctgccattaagaccgctaaacaatttgttcaccgcgccatcgctaacccgattgaagtcggccacaagtacggtccaattaaccaccatgcttaaaatacaaaaaagcccacggaaaaatccgtgggctttttgaatgtttagtgttctgcttcttcaatatcggcattgacttgttgtaagtcaaagtcactctttaaaaaagcttcgttatcacttgggaagtgctgttcaaacgtttcaaacggttggagcgtcatttgagcatcgaccacggtatagtctagaatatgaccgccaaagtcgtgcgtatcgtttaagaagtgtacgtgatagcctgcaacagctgcgccttgataaagcgctggtgcataatacccaatcaacgtgcccgttacgtctgtttgttcaaactccggttgcactcgggttgcagcagtcaaattcggataaggttcctgttgtgtttggacggcccgcgtatgcatgactttgaaagtcccagtcattttaaccgcaaaaaacaagttttttaacggtgcttgcgctagaatttgcgtttctaactcagcctttgtgcgttgatgaaccgcttgtgtaggtaatgatgaatcttgccaatgcactgtcgcaaatggaactgtcgcatcaggtgcgagttcagtcacttggccatccccattcacagtataagcatggccatctaataagaccagttcgccagctaaaccgtgcgccgtcccgattccaaaattcccatgggttaataattcagcaacggtcattgtccctgtaaagagccccggaattaatagggctaacgttccgtgttgataaacgcgtttgacatcatttgtcattgattttcctcctcaaattaaacgagttggtcaggtaataatgcttggcctaataattgattatctttgtaatcaacgggcacatctacaaggacgggaccatcaatggcaaaggcttgatccaatactttaccaagatctgcggctttttcgacccgtaacccggttgcaccaaaactctctgcatattggacaaaatcaacgggaccaaacttaacggccgctgattcgccatatttcatttcttcttggaattttaccatgtcataataaccgtcattccaaataatatgcacgatgtttaagttcagacgcaccgcagtttctaagtcttgacctgagaataagaagccaccatctcccgaaaccgacacaatttgtgtatttggccgcactagagcagcactgatcgcccatggcaatgccacacctaaggtctgcatcccgttactaaagagcaagtgccgtggttcgtaacttctaaaatgccgcgccatccagatgtaatgactaccaacatcgaccgtgacggtcatttcgtcggtgacccgtgcttgcagttctgaaataatgttcaacggatgactaagtggattatcggtcgtcatttcaggtgccgtgtcacgttgattgagttctgcgtgcaattcaactaaataatcacgcacatcgcccgctagttgataccccttcatataaggtaataaaaagtctagggtctgcgcaatatcgccgaccaattctttttcaggttggaaattatgatcgatttcagtgcgcatatcatcaatcaccataatgtgcgcatcactttcagcgttccagttacgcggttcatattcgattggatcatagccgactgcaataacaagatcactgcgttttagaatgcggtcgcctggttgattccggaataaaccaactcgcccataaaaatcagtctctaaatcacgcgaaatgacaccggctgcttggaacgtttcaacgaccggaatgtgggtttcagccactaaattgcgaatcgctgctgtcacttctggtgaagaagcgcgcataccaactaaaagtactggtaattttgcttctttaatccgttgtgccaaaagcgtcgtttcaacgggactggctggccctaatttaggcgccattagcggtttaatcactttagaatgaacttctgagtccgtgacatcttgtgggatgctgacaaacgttgcgccctgtttagcggattcagcttcttgataggcgttagcaatcacttctgataaattctcaggttcttggacttccgcactgaattttgtgattggtgcgaataaagcggcattacgcatgctttgatgcgttagtcgcaacaaatcagcgcgtttcacttgaccggcaatggctaagactggatcaccttctgccgttgctgtcacgacccccgtcgctaaattactggcaccagggcctgaagtcgccattacaacgcctggtttgcccgtaatccgaccaatcccagccgccatgaaggctgcattttgttcatggcgcgtcaaaattaatttgggcgtctttggattaacgggatgttctagtcgttcaaaaacccgatcaatcttcgcacccggaatcccgaacacgtactcaacatcatgatttactaaactatcgatgatggcatccgcgccgtaatacttcttttcttcagtcatgacttaccctacctaacctatgattttataacttatatcttagcatggaactactggaaaaactagcagagtgcgtttagaatgcgttacccgcctacagccagtttactaaaaaaacgcactcaccatcttggtaagtgcgtttttttaatcattcattaacgaacagtaatttcataacttgcattaaacgtttcacctgcagccagttcgttgacaccaaatttttctgaaagttcaccgcttgcgtcaacggtatccgcaatcccccaccaaggttcaaggcacacaaggttgccttctgttggataaggtgaccaaacaccgatgaatggggcgccagccaatttcatggtcactgagtggtccgttttttcagaacgaatactgaattcattggcttgaccctttaattcgtagattaaggcgtcatttttaaataattggtgattgatatccgttgcgacgtcggttggtgctaacgtccggtcgttcaaattaatgaaggccccttgcaatgggatcttaacccgtgatttttgtgggcggtagtctaagaaataatcttcaaattgcgtgtcatccgttaatgggactttaaatcctggatgacccccaattgagaagtacattggcccgcttggcgcaacattgcggacgtcatagccaaccgtcaaatgcatatcatgaacacgatagctcacacgtaattcaaattcaaatggatacacggcccggctgtcagcgtctgctttcaacaagaaagtcacggcgtggtccgattgttcttcgatactgaattcgcgatcacgtgcaaaaccgtgttgacccatcggataggtttggccattatacgtatattggtctgcttttgaacgccccacgaatgggaataaaacgggtgcgtgccggccccaaacatcgggatcagcttgccataaatattcaagccccgaaacggcgcccttaatactttgtaattcggcgccttttggactgagggtcaccgttaaaaattcgtttgcaatttggatcatcttaaaataccaccttttaaaaattatagaataaagcgggttaaatctttatcggctgcaatattaccgatcttatcgttgacatattgttctgtgatggtgatatcccccatctgcatgtcaggaccttcaaagagaatatcctctaatagcttctctaagatggtggccaaacgacgcgcaccaatattatcggtatcatggttaacttggaaggcaatcgcagcaatgcggccaattgcttccatcgtgaaggtgacgtgcaccccatcggcgccaatcaacgccatgtattgttttacaagtgcgttgtttggttccgttaaaattcggatgaagtctttttcagttaaatcttcaagttcaacccggattgggaaccgtccttgtaattcagcgattaaatcgctgggttttgattcagcaaacgcccctgaaccgataaataagatatggtcggtcttcaaaacaccgtatttcgtattgacttgtgagccttcaacgattggtaaaatatcacgttgaaccccttcacgagagacttcaccagattgttttttgccaccagccgtaattttatcaatttcatcgataaaaataatcccggtattttcagcacgttggagcgcatcatggtaaatatcggcatggttgactaatttagcggattcttcttgaatgaaaacttcacgcgcttctttaaccgttaccgtccgcgtaatttttttcttcggcataattgaacccagagtatcgtttaaatcaattcccatctggcccatcatatcgttcattggggcaacttttttcggttcatcaacttgaatttcgatttcccggtcatctaacaagcctttatctaactgttctttaacagataaccgttcgttacggatatcatccgtcacttcttctggttcagtttgtccgaaaccagctggtgtttcccctttttgaagcgcgttaaacatgttcattaaatcattcatgttgttattgttcttacgttgttcctttttaatgcccggtactagtagtttaaccaagcgcttgtctgcttgacgagcagccttagcacgaacgtttttaaattgttctgtttcttccatatgcacagccacatcagctaagtcgcggaccattgattcaacgtcacgtcccacataccccacttcggtaaatttagtggcttcaaccttgataaatggggcatcgacaactttcgctaaccgtcgggcaatttctgttttcccgaccccagttggcccgatcattaatagatttttaggcgtgatttcttgttgcatttttgcactgagttgcatccggcgataacggttgtatagtgcaaccgcaacggcttttttagcttgatcttggccaatgacaaattgatcaagttcggcaacgattgttttgggtgttttattcattaagtccattgtgcgacctcctaaaatgattcgacaatcacgttgtggttggtgtaaacatcgattccaccagcaatatcaacactggttgtgacgattttttcaacggataagtcatcttttccttcaagtaataatgcggtagctgctgcttgggcgaaattgccgcctgaacccacggcaatcacttgatcacctgattccgatagcgtatcaggggtgatgacttcaccattccctgaaattaataaaatatcagtcgcattgaccgcaatcaacatcgcttctaatttttgaagcgttggatctttacgccagtcttgcgctaaagcaacagcagcatgttgcaggtcgcctgaatacttttctaatttttgttcaaaccattcttgtagcgtaaaggcatctgcaacaccaccagcaaagccgattgcgacttgattaccataaattcgacggacctttttagcagaatccttcgtcacaaatttttcgcccatggtgacttgaccgtcaccggcgatagctgttttaccattatgtttaactgcacaaattgttgtcatatgaattactcctaacgttgtttggggattgggcggggcttaacgtgcttttcaaactaactttctgcgcttagcgctgtgaatcaaatcagcgactttatcgctaattcgcttccctgtgatagtgctcaaaagttgaacaagcttgaaagcacttacttttttcttaacgtgctttcatcaactgctttctacgctttgctacatctgtcatatcaccggcgttgccggtaatccgcctgattaggcaaatgctcaaaaacaacccgttgatgacgcacttctttcttaacgtgcttttcaaaccatgttcttgcgtttagctacacaagtcaaacaattgcttccagtaatcattcgccttgttaggctaattctcagaacataaccggtttgaacgcacttctattttagcagtctttaagactgtgtgctaatattagtctatttttcgttgaaaaaaatcaaactttagtccgagttttacgcgcggggaaagaattggcggtaatctttttgtaaatgggctgtggtgacatgggtgtaaatctgtgtggttgataaactactgtggcctaataattcctgcaccgttcgcagatcagcaccgtgatccaataagtgagttgcaaaggtatgccgaatcatatgcggatgaatgtcactcgttaaacttgttttcttgataatctgatctaaaatgtattcaattccccgacttgtaattggcgctccgagatgattaacaaaaacgacatcgtggtccaattgttttttggccatcaattgaacacgaccaacttttaaataagcttgcaaggcacgtccagcatggtgcccgaatggtacatagcgatctttattgccctttccatgaacaagaatgacgcgtaagccgaaatcaatttgtgctaccgtcaactgcgcgcactcactcacccgcatccccgtcgcatacagtaattctaagatggcgcgattccgttgatcgagtggttgatccccatcaatggcagcaaatagcgcgtccatttccttttcgtaaaaaaaccgcggcagcttatgctgttgcttttttaattgaacagcttcaaaaggatcggtttgcacgaactcatttttcactaaataccggtaaaacgaccgcaaactcgaaattcgccgcgcgacagtttcatgactatattctttttgatccatttcattcaagtaagtttgcacgtccagtggcgtgacctgtttaaacgacgctaagccgccgttagcggttaaaaaagcactgaacatctgaatatcagcttgataagctttttgggtttctggcgagtaatgccgatcgaccactaagtactgtaaaaaaagattaagccattcttgttctaacgccaaaaaaatccctccaagcttgattagtattactttaccacaagcctggcgggatttaaaagattctaattaaagtgtcgtcttaaattggtcgatactttcaagtgcgcgatcagcaagtgcttggttccgttcctttttatcgcgaatccgttgtttcaaaggttcgaaaatcccaaagttcgcattcatcggttggaaatgtttagcactcgtatgggtaatatagtgcgccattgatcccatcgccgtatccgttgggaaaacagccggtgtttggtccaacgccagtttagcggcgttaatcccagccactagtccagaagcggcactttcaacgtagccttcaaccccagtcatttgaccagcgaagaatagatcgtcacgttgttttgattgataggttggtaataaaacatctggtgatttcatgaaagtattgcgatgcatcacaccataccgcacaaattcagcattttccaaaccaggaatcatgcggaaaacccgtttttgttcgccccacttcaaatgtgtttggaaaccaacaatgttgtacaaactagcagccgcattgtcttggcgcaattgcacaacggcgtatggttgtttgccagtattcggatcttccaatccaacgggtttcaaaggcccgaataacatcgtcttaatcccgcgtttggccatcacttcgattggcatacagccatcaaagaacttttctccttcaaagtcatgcatttctgcaacttcagcgctaatcaaggctttgtagaagttttcgaattcttcttcagtcattggacagtttaagtaagcagcttcgcccttatcataccgtgatttgaggtaaactttatcgaaatcgatactgttcttatccaaaatgggcgctgcagcatcgtagaaatacaagccatcactgccgtttaaggcactgattttttcagctaagccttcggacgttaatggaccagtggccacaatcgtaggaccttctggaaaatcggttaattcttcatgatgaactgtgacacgttcatgattggctaagcgatccgtcaccgtttgtgaaaacggtgtgcggtcaacggccaatgcgccaccagcaggaacggcattttgatcagccgcactgatgattaatgagtccaagtgacgcatttcttctttaattaagccaaccgcattggtaatttggttcgcacggagcgaattcgtacacactaattctgcgaattgttctgtatggtgcgccggtgtcattttaacgggacgcatttcatagaggtgcacattcacaccgcgttgggcaatttgccatgctgcttctgaaccggctaatccggcaccaatcacgtttacaaaaggttctgtgctcatttgctagtctccatttttctaattatttttggacggtttcttcgtagtcaccgtttggacaaattacttgtttgccacctttaattttcttttcaacaaggtagtgttcacacttcggacagtttctgccgacgggtttatcccatgtgacaaaatcacaatctgggtaacgatcacaaccgtaaaataagcgattcttcttcgatttacgttcgatgacttgccccttaccacatttgggacaggtgacgccgatttccttcacgattgccttggtattgcgacaatctgggaagcgactgcaagcgaagaatttaccataacgacccattttaacaaccattggggcaccacagatgtcgcagtcaaagccagctggttcatctttaatttgtactttttcgatttgttcactcgctttttcgacttctttttcaaacggtttgaagaagttgtcaatcaccttgacccagtcttctttacccgtttcgacttcatccaaacgatgttccaaatcggccgtaaagtcgatgttaacgatgtccgggaagaattcgacaattaaaccattgacgatttcccctaactcagttggttcaaagcgttttgcgtttaacttcacgtaataacgccgttgaatcgtttcgatcgttggtgaatacgttgatggtcgaccaacaccgttttcttccaaagccttaactaaattggcttcagaataacgtgctggtggctgcgtaaaatgttgcgctggatcagttttaacgagtttcaccgcatccccaactgcaagttctggtaagacattatccttagcagagtcttcagtatcacgtgatgacacatagagtttcgtgaatcctgggaacttcatttgtgagccgtttgccttgaataagacatcaccttgagcaatcttaactgcgaccgtatcaaaaatggctggtgtcatctgactggcgacaaaccgtgaccagattaagttatagattttatattgatcgttagttaaaacgtctttcaagctcttaggtgtccgcatcactgacgttgggcgaatcgcttcatgggcatcttgtgcaccttcaggattcttcgtcttatgcgcctttaatgccgcatattcttcaccataattgtcatggatgaattgtgacgcttcatgtttagcaccggtagaaatccgggttgaatcggtacgcatataagtgattaacccgaccgtgccttctttgccaccaaggttaatcccttcatacaattgttgggcttgcatcattgttttccgcgttctgaagttcaacttacggttggcttcttgttgcaaggaactcgttgtaaatggtgcggctgcaaaacgtttgcgttcccgtttcttaacatcttcaatcgtgaaatccttagtcttatcgatttgtttcaaaatcgcttgaaccgcatcattatcgctaaggggtaatttcttacccttcacgccgtagaaactggcgttaaacttactgcgactctttttaaattccgcatccaatgaccagtattcttctggaacaaaggctttaatctcgttttcacgatcaatcacgagttttaacgcaacggattgaacccgaccagcactcaagccttttttaaccttttgccagagtaatggactgattgaatacccgacaatccgatcaagcacgcgtcgcgcttgttgtgcatcaacgagtttcatatcgatactacgtggatttttaaaagcacttttaacggtgtctttggtaatttcgttaaagacaacccggtttttttcagttggatcgagttttaaaatatgggaaacatgccatgcaatcgcttcgccttcgcgatccggatcggctgcgagatagatatgatcaacttttttagcttgcttttttaattctttaatcgtttcgcctttaccgcgaatcgagatatatttaggttcataattattttcaaaatcaacacccatttgactctttggtaaatcgcggatgtgacccttgcttgcaacaaccttatagttgcgcccaaggtacttttcaattgttttggcctttgcaggtgattctacaatgactaaatttttgcctgccatggacaaacccctttcaacagaacgctttgttcaaatcgttcattagcataaaacactaccttgacgattgtcaactgatagtatgcttgatattaacagcttaaagcatagcataggtttggcagtatgccaaagagaaattgttttcaaacgtacaaatcacaccaaaaatcggggttcaaccacttggtcgaaccccgatttcttctattatatagtcgccagataaaaaacttagactgacaaactatttttttgtgcatcgcgttcaagaatccccgcaataatttgatcaagggtgatggttgccatctccgcttccgcagctttttgcacctgatcataagccgcatcaagggttgcttgaatgttgctaccaattaaacaatctggatttgttttttcatcaacgtgtaataaccgttgatctgtatcaagcgcctgaaaaacggctaacattgtaatctgttccgctgggcgcgctaatttaggggcaatcgtccccggtttagtcgctaataaatccgccttcaccagtagtgacattagccgccgcactaaactaggattagactcgatgctcccagcaatcgcttggcttgataaatcaccatcttgaaaaatatcgacataggccaaaatatggatggcatcactaagtttatgagaatatttcatggttcaaccgcctttttgaaatcaattcaggcttatttaataatcgtctgtaacgcttcttttaatgaaggtaatggtcggcctaagacatcgggtaaatcagaagtggtttcatctaaatcaccatcttgaatcattgtttgaataccagtgacaatttcagcgacttcagcaggtaagccgttgtcttcgaggctttgacgataatcagccgcatctaatgatactaccttaaattcttgattagtcaactcgctaatcgcttgagctaaatccgcataagtggctggcgcaccggaaaattcataaatcgcttttggttgatcgttgactaataccttagccgcagcttcagcatagtcgtgttcgagtgcccaaccaacatgcccttcaccagcgccataaacaaatggttgacctgctaatgcgcctttaatgctatccatttcgttttcaagataccagttattgcgtaagaatgtatgatcaatgcctgatgctgccaatgctttttcagtttgaatgtgatcacttgctaaagcacctgttgcttgatcagcgtgtgggaaactcgtataagcaatccacttaacgccagcctttttagcagcttcaatcacgtttaaatgttgttgcgcacggggcacatcgccaccaggttgtgaggagatgaataataaccggtcaacgcctttgagtgattccgttaatgtggcaacatcgttatagtcaccgggacgaacggtcacaccagctgggaccattttagtggctttttcagtattccgtgctaatccaatgatttgttctgctggcactaagtcagccaacgtcttcattgcgacttgcccaaaacgacctgtcactgctgtaattgcatatttcatattaaaaatcccctttgaattccatttgttactttataagtaacttgtgactttaatattaacaacatgccgcagaattgtcaacaattaaccctcaatcaaaataatgcaactcgtccaataacaattgttgatttaaaagcggtgttgcaccggctaaaatcagttgattacagcctgccgataatgaatgattaacctggcccggtaaggcatatacgttacgattggcttgtaatgctaaattagcggtgattaagctaccacttttttggcgggcttctgtgaccactaaactatgacaaagtccggcaataatccgatttcgggctgggaagtggtgcttcttagccgttacgtccaaaccgtattctgatatcaataaccctttttcagcgaccgcctgttgcaagtgttcgttttgtggtgggtaataacaattcaagcccgttccaatcacgccaatcggtcgtaaccctttttggagtgcaacttcatgcgccatcgcatccgccccttgagctaaaccactgataatcgtcgttgtttgtggtaatcccaataaatgctgcagggcttgcttagtatactccgtggcttgccgcgcaccaaccaccgcaacacatggctgtttcaaaacacttaaatcgccgcgataaaataaaactgttggcggacaatgggtttctaacaaccgttgcggataatctgcttctagaatcgtcagatactgaacataacgttcatgcgtggcacacttctgttgcagagctagactgtcaaaactagtctgaaaggtcagccaatatcgctccggtaaacacgcaatctgcgcaatctccaatgccgataaagcccaattgtgactcgttactaaccatgcggctaagcgtaattcactgatggggccaaacccatctgccaggtgtactttcaataataattgctttttagtcaacacaaaaaaacagctcctttacgtttatcttcgtaaaggagctgttttattttctatagggcgtctttaacgggcgaaaaactgcggcggtgaattggcgtaacaccgaattcagctaaaccagcgagatgtttcgctgtcccgtaacccatattattagcaagatcgtaacccggatactgttgatcataattaatcatcaattgatcccgaatcactttagccacaatactggctgaggcgatactaatactgcgcgcatcccccttaatcaatttttcttgtgggatgtctgtcggcacggtcattgcgtccaccaataggtaatcggggtgttctgctaaaccagcgacagcttcgcccatcgccagttccgtagcgtgatagatattctcttggtcgatccgtggtgcatcggcaatcccaatgctgacactgatggcttgtgccatgataccgcgatacagttcttgtttcaccttaaacgaaagctgtttagagtcgttgacttgccataggtcaaaatcatgtggcaaaatgacggccgctgtcacaactggacccgctaatgggccgcgcccaacttcatcaattccagcaatcaagggataatctggccataaactttcttctagctggcgtcgttcgataaacgccgctttttgcgccgctaacttagccatccgcttgtcatattgaacgagtaacttctgcacgccagcacgcgcatcactgcgtaagagcgccacttcttcctctgaaatgtcgtctaataagcgtgccttaatggcagcaattgattctggtttggtcattagtgcgcctccacaggaacgatatcgagtgtaaagcgccctaacttacccttacgcgcgtccgtgatgaatttcatacagaagcgatcgtagtcttctttaaaacctagtcgtttggtcaatgccatgattaaatcaggcgctggcatttcaagttcagccggcgtcacatggtattcttttaccaattgttgcggatagaaatccttgaaataatcgagggcatacaccacaacatcatccgggtgataaattgcatccgaaatcgcaccagttaaggccaacttattgccgacagctggatcttcgaatttaggccataaaacccctggtgtatctaacaattcgagtgattggcccgcttttaaccattgttgattcttggttacaccgggtcgattacctgttaccgcaatgtttttttgcaccaagcgattcaaaatcgttgatttaccaacgttaggaaccccaacacacattgcacggatcaccggattaagaatcccttttgcccgttttttagcaagtttgtctgccaaaatttcttgtgctactttttcgatttgcggtaattttgatttatgttgcgcatcaagcgcgattgctgtaatcccccgttttttaaatgtttcaatccattgttgtgtgcgtttggcatctgccatatccgctttgttcataatcaagagcgtcggtttgttttgaccaagttctgcaatcatcggattaatggaagattctggaacccgtgcatccacgatttcgagaatcaaatcgactgctttgagccgttctttaatttgcttttgggcctttgccatatggcctggataccattgaattgtcataataactcctttattgctagttaagcgatatacatcattcttaatatttgtcactgattgtattattcttaattctatcatacctgatgtctggctgacgggttaaatttaattccggactacaacatccaccaattaagcgtatcattttttcagttaagcatcatattcagtacatttcatacgatcattagcactcgataatcaaaaaagctgacacactctagagtatgtcagcttttaattattattttaaagattgtatatctttaatcggccagtagaccgccactgctcggcctaatattgtatcgcggtggatcgtaccaaacaagcggctatctttgctgatctggcgattgtcacccaatacaaagtactcatcttttggaatctgcttttcgccgattaaggtttttaattcaaaatctgatgttaaaatccctggtttctttttggcctgattcaagaatggttcgtcgacatgccgtccattgatgtacagctggtcattgcggtatgcaacggtttcacctggcagaccaatcacccgtttcacataagttgtttgatcagctcgggtgaagacaacaacatcaaagcgcttgatgtgcccactagtgcgtaataagagttggtccgctgactcaagcgtcggggccatcgattgccctgacaccgatgcggggaccagaatgaacgaccgtaacacaatcgctaccgtcccagccagtaaaaatgcgagaagccaatagccggtaatggcccatccccgccacaatttctgcttcggggaagtcattaggcttgttcgctttcctgataggcttcatacgcctcatcaaaaatcgtcatactcgggaggtagctgccattaagttccaaatagcgcgttaatgtttcataatcgccgctttgtttagggaaagattggtcaaaaaaggcattgttggcaaattggggaactggttcataattattcggatcacgttgggtcatgaggtaacgataaaaactctgcttcatctgaacaccttatttcttattttttagcgggatatagacgtttaaatcaatcttatcattcttcaaatcgatatgtttagcagttacttgcatcccgttttcgagcttgaactcatttaggcgtaatgtaatccggctcttgtgtgcatccaaaataacccatttggggaatttgtattgacgcttgatgtaattaaagacaaacgacatgggcaccttcaattgtccgactgctaattgtttggcgcgtaattggacgtcgccattttctaaaacgtacggttcaaaaaagaggttgaattcgaccggaaaccctaagaacttgaattgaccagataaaatcgcctgctgatccagggtgagttggtatttaatctttgaatcttccaagtagttttgtaaataataggtgactaaactattgatttgtctcttatgcatctgaatttcaaaagtgctatcagctttgatgattttctcagttttaatcatttcagtcttaggggctgtcacgttatagccgacaagaccaactgtcccgatcacgactgctaataagacgatgaaactgtatttccaataattgatggtccgtttagttgttgttttctgtgctgcttgatgtgcttgtctggttgtcataacctatcctttctctaatcccacgtttgcttgtgtgctttcatcacttgccaaaaggcctttgtgacccattgataacctttatgattgggatggaaatgatcatctggactgatataggggttcaaatgctcgttagccgctaatgttttttgcaactgtgcactatccattttagcgagcgatttagtctgtttgacaaaatgcccatcgccccgtgtcaacatccgatcactattgacataatacgtatctttgaaatcattagcaaccgttttggcggtctgattccactcagcaaccgcctttgacatcccagtgatttcagggaaatagacataaaacggattgtagacccccatgatgaaaattggggcatcaggattatattttctaatttgcatcatcagcgtggttaaattcgcttgatatttttgctgaccagtcgtaatccgacgttgattcagctcaaaaaaattattctgtaaaactgccattaggtcgttgcccccaacagttagcgtcacaatatcagcttttgccaattgctgctgtagcggcttttgtttctgcacgcgtttagtaatctgtacactggtatcgcccgtcacaccgaaattggcggtcttgacgggatgcttggttgcttgctgaatctgattggcaactaatgacacatagccttctttgttggtctcatcaccaacaccatgcgtcaatgaatcgccaatcgcaaccaactgcaacgtcttttttggttttggttttgatttgatcactttatccgctgaagacgttgatgttaccgtcttaggcgcttggttgggccgtggcgttaatagttgccagataataaagaccactaaaatcgcaccagcaaataagcctaaatcaattaaaatctgtcgtgctttcttcaaacgtgacacctcggttatttctagataatagttaaggctgggacaattaaatgtcaaccagccttagtgtgttaatacattaattgtaatcttgttaatcctctgtgtagtacataacggcaaatgcgcctgcacccgcatgcgttgcaatcactggatcagttgtccggacaagaatttcgatgtttgggaatactacttgcaattgtgctttaattttttcgctcaattctagcccatccgcatgtgaaatcccgattgcccgaatctttaagtcgcgcatatcagcttccatttcatcgatgaatttcgtaatggtcttcatcccccggcctttgcgtaacacttttaattcgctatcagccacttcaaggatcaccttgatatttaataaacttgaaatcacaccagccgcatgactcaaccggccccccttaacgaggttggttagatcagtcacacccatgtataacttcgtatgatcgtgtacgttttgaatggctactaaagcatcatccatgctaccgccgttttcaatgacttctgccgcttttaacacttggaatgccattgcacggtcggtaaagtcgctatcgacaactgttacatctgctttcgccatctcgccggcttggcgggctgtatcaacagtgccactaattgctcgtagcatgtgaattgataaaatctggctgccatcagccgctaattgttcatacgtttcgacaaaattcccgattgcgggttgactcgtcttaggtaaggcactcgcacttgccatttcagtcataaattgatcgcgggtaatggtttcaccatcgatatacaccgtattgtcaatcataatcgtcaacggaataaccgtaatatgatgttctttaatttcttcaggagtgagttggatggatgaatccgttacaattttaatattagccactattacttcagccacgctttctatcttgaaatctgggcaatcaacggccccgtgatttctatgattatgtctattgacagtatatcaaacaatcacgcttttttcaccaaaagttactgattaaaaaaaaagccagttgtcacttttgtagcaagcaaaaaggcggttacatcgctgcgaccgcccttaattgaatctttctaacggcgttgatagatttcaaacgtatgcgcatagcgattacgttcgtccaccacaccaggtgtttgactgatcaattcgaactgatccatcgctaattttggcatataaacgttgccttcaaacgattcagcaatttttgtaacgtacagataatcgacatcatcggcgtacattgcaaaaatatcggcaccaccaatgataaaaatctttttcatcgggttggcttgctcatatttaagcagttccgctttggtgtgcatcacaaacaccccatcagccacagctaaatccggttgtcgcgtaatcacaatgttttggcgtccaggtaagggttggacgggtaaactatcatacgttttccggcccattaccaccacttcatgaaccgtttcgtgtttaaaattggcaagatcgttgggtaatgaccatggtaagtgaccattttgaccgattaacccattttgatcttcagcccataagaatgctaacattggcgctcctcctcattaaaccgcaacgggtgctttaattgcgggttctgcttcatagttttcaagtttaatatcggcgacatcaaaatcaaagatgcttgttttatctggattgagccacaattttggtgcggcatgaattgggcgttgaagctgtgtcttcacctgttcaatatgattactgtaaatatgggcatcacccaacgtatggatgaattcaccgacttcaaggccggtttcatgcgcaatcaaatgtgtcaatagtgcgtagctcgcaatgttaaatggtacgccaaggaaaacatccccgctgcgttgatacaattggcacgataaccgtccgtcattaacgtagaactggaacatcgtatgacaaggcggcaacaccatacttggcacgtcttctggattccaagctgagacaattaagcgccgtgaatcgggattggttttaatttgttcaatcacgtttttaatctgatcgattgtgtccccagaacgggtttgccaagcacgccattgtttaccatagatatcgcccagttcaccatattgtttggcaaaggcttcatcgtctaaaatccgttcgttaaactgttgcatttggtcgcgataaacagtattgaaggccgcatcagtttgggcacgatgaccaaaatctgtcatatccgggcctgtgtaatcggcactttgaacgtaacgttcaaacgcccattcatcccaaatatgattattgtgttgtagtaagtaacgaatattggaatcaccttttaaaaaccacaataactcacttttaattaacccgaatggcacttttttggtggttaataaaggaaacccttcgtttaaatcaaagcgcatttgatagccaaacagactataggtgccagtgttggtacgatcttctttataatgacccgtttctaaaatggtacgttctaaatctaagtaggtttgctcagacatgatgtggattcctttctttaacgtgcttttcaagctaactttctgcacttagcgacgtatgccaaataatcgactttgtcgcttattcgtcacactaagctaatgcttaaaagttgaacaagcttgaacgcacttcttttaacgtgctttttgaagctggcgcttgcgcttaacgacatttgtcaaatcagcgattacatcgctaattcgccaaattaagttaatgctcagcgtcaaaccgtttcaaacgcactcagttttttaacgtgcttttaaaaccatgttcttgcgtttagctacacaagtcaaacgattgctttcagcaatcattcgccttgttaggctagtgctcggaatatacccggtttgaacgcactcatttagtttgcgtattcacttaagtattcccagcgggtcattttttcgtctagttgttggttaagttgatccatttgggcctgccactctgctaatttaccatagtccgcgccgtttgcgttcatttctgctttgatggtttcaatctgttcgtccaattgttccatgtcggcttcgatgtgttcgtattccttttgttcggcgtatgttaatttctgcttggtctttgcaactggtgcttcttcaaccgatgctgtcgctgctttaggcgctgacttagttggtgttgctttttgttttgccaagtaatcgctgaacaggccaacttcggtgctaatcttgccggccccttcaaaaatcaagagtttgtcggcaacttgatcgaggaagtaacggtcatgcgaaactgtgatcacagtcccgttaaagttttccaagtaattttccagaatcgtcaacgtgccaatatctaaatcgttagttggttcatccagtaataagacgtttggttgttgcatcaaaattttcaacaagtacaagcggcgtttttcaccaccagaaagtttgccaatcaatgtgccgtgcatttgacggctgaataggaattgttctaacaattgtgtgacactgatccggtccccatttttaccaatgacttcttcgccggcttcttgcaagtatgcaatcactcgtttgttaggatctaagtcttcattttgttgcgtatagtagccgaggttgacggtttcgccgacaattaactcgccactatcaagtgggaggcgttcagccaacacgtttaacagtgatgatttaccggccccgttgacgccactaatcccaatccgatcattcgcttgaactagaatactaaagtcatccaaaatctgacgatcgccgagttttaaactggcgttctttaattcgagtacttttttacctaaccgcgattgccccatctgaatatcgacttccgaatcgtctggtccagtggttaaattcgcctttaagtcattgaagcgattaatccgcgcttgttgcttggttgttcgtgccttagcacccgcgcgcatccacgttaattcttgcttgtagagttgttgttgcttatgggcagcttgttgttcacgttccaagcgatcagctttttgggttaaaaattgttcatagttaccgttatatgaatagagttgaccaccgtcgagttcaaaaatttggttcgcaacacgatccaagaagtagcgatcatgcgtgacaattaaaagcgcgccttgatattgtgctaagcgtttttcaagccattcaatggaatcaaaatccaagtggttcgttggttcgtccaaaatcaataagtctgggctttcaattaaggcttgtgccaacccaacccgtttttgttggcccccagataatgtattaatcggttgatccaaatccgttagatgtaattgcgtcaaaatcgtcttgatatccgtatcaaccgtccaagcatcttgttgcgtcatttgcgcatcagcttgttcgtattgcgtctgtaacttcggattagtgggatcttgcgtatatgccgccaagacgcgttcatagttttgaatcgtcttgaaaaccggattatcgccggcaaaaatcgccgccataatacttaagttcgtatcaaagcttggtttctgggctaaataactcatcgcgtattggttaggcgtttcaacctgcccgctatcgtatgaatccgtgccggtaatcgcgttgagtaacgtcgttttcccggtcccattaatgccgactaaaccaatgcggtccccttcacggattaaaaatgaaatgtcttcaaaaagcgttttttcgccgtaagtcttcgttaaatgcgttgctgtcaatgtttgcaatatagtcacctttttactttcgttaccatcaatcatagcgaataatcagacgactgacaatcaaaatgacaaaaagaatgtcgtaaactgtaaacaaataaaaaaagcccctgacaacgatcaatattgtcaggagctaacgtttaaatttcagggtacatatctgcaattgtgtgttctgcatcaatcacaatgtacaaccgaccatttttttgtgagatttggctactttgataaatattatctaagccactattatctttattcttgaatgggaaataaatttgcattggtgcgcgatcttgatcatcttcaaagattaaatcgagtttttcgatgtcttgatacttcgttgcacgaccgaacatccccatttcaagagaaccggtgttgatgtcttcggacttcacatgatccgcttcaggtaagatttcggctttgaaactcttgcaagggtgaatctcttgcattgggccaccattaatgcgaccataactggtggtaacacggctaatccaaatatcatttaattctttgtggctgacggtccaagcgtcaccatttctaaaataaaatttcaattccttaaaaacatgttgtgtcatcaattgtcaccctttctgaatgtgcttacatggttattttaacacaccttctgagggaatggcttagttttgtgcagccgattgcaataattgggcttgatcgtttggtaattgatctaacaccacggctttttcgagttgcgccaacatttttcctagttgcggaccaggttgatacccattttgcattaagacttgtccattgatggcgagttccgccttttgcttgatttgcagtgccgcatactttgcttgccactgatcaactgcgactgattcgttggtcattaattgggcaacaattaacgtgatgtctaatacatgttgccccgcttgataaagggcccactgatcggctgattggtctagaatggctggcaataatcccaaacctgctttaaccgcatcgatcacatcgttagcactcttccagcgtttcaataatttgccggcggcggcgggggttttacccaataatgcattgactagtagccaagccgtatcttcatcatgaatctgttgcgctggtaatgccgctaatttggtcagtcccgctgcttcagtcgcgaacgctggacaatattgatacaacccggtttttaaaaaggtttgtaacccattttgccgctgaatcccttgtagcaacttcacaaattcgacatgaatgcgttccaccgcaattttcgttaatagttcagcatgtttggcaatcgcagtttgtgtttctggtgtaactgcaaagccgagttgactttcaaaacggacggcacgcatcatacggagtgcatcttcgtggaaacgttcgtcggctttgcccaccgctctgatttgttgcgcttttagatcggtcaggccatcgaataaatcaataatttcaccatcagcgcgcatcgcaagcgcattaatcgtgaaatcccgccgttgtaaatcttcgtctaacgaccgcacaaacgtcactgaatcaggccgtctaaaatcttgatagccactttccgttctaaaagtggtcacttcatagccagtcccatgatcaagaatcatcacagtcccgtgctggattccggtatcgaccgttcgtttaaaaatttgcttcacttctgctggatacgccgacgttgcgatatcaacgtcgtgaatcggcaagcctaataaataatcgcggacactgccgccgacgaaataggcttcaaaacccgccgcttcaatttgttttaagattggtagggccgcttcaaaatccggcgcaaaggtggttactttcatggctatccctcttatctaacaattaactgtttctgatgctatttatcataccacaatcaaggaccccacttcagccaccaaagtggttccaactgtttttaacccccattccgtgctatatttgagttatgtaaagggggcgttgacatgacgaaacaacatacttggcaaacgactagtcgtgatttagcggtgattgcgctgggctgtgcgatctacgcgtttgggctagtgaccatcaacattcaaaatcacctggctgaaggtggcttaaccgggattaccttgattttacggtattggttgcatatcgacccggcgtattcaacggctttgttaaatatcccgctaattattctaggctatcgttacctcggtaaacgcgcactcgcctacacgatttacggaacggcgatgatgtccgtttttctatggatttggcaacgtgtccccatcacaattgatttaaaccacgatattttaatcgccgctattctagccggtttatgtagtggcttcggcagtgggattatctaccgcttcggtggcacaactggtggcaccgacgtcattgcccgcattatcgaaaaagaaaaagggatgccaatgggccgctccctccttctttttgacgtcgtagtcttaacactctcactcagttacctcgatatcgaacatatgatgtataccttaattgcgtcttacgtcttctcccggattgtgaacttcacactcgagggtgcttacgccgccaaagggctactcgtaatcagtgaccacgcgcaagcaattgccgatgacattctggccgatatggaacgcggcgtgacgtttctacaggccacaggcgcttatgcccatcaagaccgaccaatgctgtactgtgtcgtcagtccaagtgaaatcgcctatcttaaacggttgattaaccaacatgacccgcacgcattcgtttccattattgatgtgcacgaagcactcggggaaggctttacgtacgactaatcaataaaaacgccagcgattaatcgctggcgtttttaagtgtctttatgataattcctgtccctcagttaactcaatttctttttcaacttcttcaaccgtcacaaaatatttttgattgcgcagaacaaagaaaatcccaattaaaatcattaagctcgcaaaataaaaagtccaatgcgctgaccatttctcagcgattttaccagcaacaaatggtgcgattgccccgccagtaaagcgaataaagctatacgccgatgatgcaacactgcgttcaatcgaatcattttccatcgcaaccgtcgttaacaacgtattcaccaagccttggaagaaaccagcaatgatgacgccaaaggccactaaggctggttgatctgcataaataccgatcaccattaagtagatcaagaaaaagcttaacccaaacaacaacgtcacaagggtattcgttttttgttccatccgtggtgcaatgaaaaccgatgcaatggctaacatcacgccccacccgaaaaagacaaaaccaacttgcaattcagttaacccaactaataagaatggtgcatacgctaaaatcgtgaaaaacccgaaattatacaataatgcaataatcccgattgaacgtaaacgatgattttttaacgcgacagcccctgcaaaaaaaggcgcccttttagcaggtttagcaatcggttctaatgaaaccatgatggtcaacgccgcaataaacatcaaaatggcgacaccataaaacggaaaacgccatgaaagactccctaagacgccacccacaagtggtccaacggccatcccaattcctaaagatccttcgtataacataatcgcttgttccgttttttcaggcatcacactgacaatcgcagtcaaagcggttgataggaacaaggcgttcccaaagccccaaccggcccgtagcgaaattaattgcgtaatggtctgtgaacgaccagctaacgccgcaaataaaacaataatgatcaaaccaatactaatcgtttttttcgcaccaattctagtggaaataaaccctgtaaatagcataataatccctgtgaccaacatataactcgtaaatagtaaggtcgtttgcgctggtgtggcatttaatttaaccgcaatcgtttttaaaatgggatcaactaaaccaatccccataaatgcaaccacacacgtaaatgcaacggcatacgccgagcgtagccctttattttgattctccagcaacatatcactctctttctctttatataaactacattagattgcaaaacatatcaatttttacattaaaatttgacataatatagtgacatgtttgttgactctaaatatggtatactgagcaataattaatcgattaaagggtgaaataatatgagtacgcttagctatattttattatgtatgttagttcgcaaaccgtgtagcggctacgaattaaagcagtacattaatttattttgggaagcacaccacagtcaaatctacacggcattaaataaactgcacgaacaaggctatgtcacggttaaaattgatcccgttcataaacaaaagaagatttatcatttaacagaagccggccaactcgtcgttactgactggtttcaagaagaaacgaatttacccacacaacgtgacgagtttttagcaaaagtttacgttatttcactgttcaatcaagaacaagcagctgacttactccaagatcgccgccatcattaccaaaaaattcaaaaacaataccaacataagatgcaagaatacaacctcataaccgatcccaccgaaaagcaaaaaaacttaggtcgttacctgattttgaaacggcgcttaatggtctgcgcaacagaattagaatggtgcgcgtgggcgcaggacattcttaaccgcaatcaaaaccaataaaaaagacagctaatgcacttaaaaatgcactagctgtcttttttatgctttagttaaacatttcccacaataaacacgagctaaattaactatcgttagcaggcaaagcatactaacggccattaaaaacggtccagcgagcaaagccgccattgagatgggtgcttggtacaaaatggttcgcccgacatgaatcgtcaggctccaaactaagcccccggctagtaggctgactgcaagacaaacaccaactaagatcactgcatgcgattgttgtgtcagcaatagttgctgttttgttaaaccgagcaactgtaattggcgcatttgctgggcattatcctcttttgcgactaacagcgtcgccaatacattcgctaatacaatcagtaacggcgcgcccaaatataaaccaattgtcaaaatgaaattcaccaaacgttcattgttggcactcgtggtatttgtataggccggtatattccacataattgccgacatccccgtaattaaaaccgcaatgaccgtcactggcgtatacaacggcaaatatttttcagcagtatagtcaatatcatgggctgccatgttcaaaaagagcgttctagcacctaaccaatagagcacgtggctaattaattttaataccgtgtgtccggtaagcgcaattagaattaataataagaacaacacgagattcaggttgccaaccgaattgccgagactgccaattgctttctcggaatgaccgacataggttaacgccatgctttgcatcgttagtttaataattaacccactgacgaccattaacgaaacaatcgtcctaactctacgaacgatccgccgtcggtgactgagatgcttattcccatcttttagttgatggcgtgcatgctaaaaaccaccactaccggtaattagactaaccaagacaaccgttaacaaaagtgccaagaacgaaaaatgaattggcatattcggcaacatttggggcccaacaatctgctgcaaccacgcataacaaaaacgcgttagtggcaaggcaacgactccgccgagcagagcactcaccccactgacaattccgatttaaatccccaaaatagcggccagtgcattgatcgttgcccctagaatcgcaagcattagatagtccgttttaaactgatccaaaagctggtgcacgacttctttaatcacgattaccattgtaataccaccaaaaaataccggcatgataaaaatcggcaacggtgtattcggaccgtatagatcaacttgctgcgactgtgccacattcacaattcccgttaaacaaaaaccgaggattaaacccactgttacaaaaactggtattgttgctagccattgccgccaggaatgctttaactgtaaccaactgattgtccacatcgcttacaccacctgatccaaggcggcatagattgtcgcaagtgtcggttcagtcacaatttgctgaacctgaccgtcttttaatacaatcgcacgatctgtctgactagccagctcaatatcgtgggtcaccataatcaccgttctccctttagcaaccatctctttgaaatatgtaaaaataatcgctttggatgccgaatctagcgcacccgttggctcatcggcaaatagcacatcacaatcagttagaatcgtgcgagcaatcgcgactttttgttgctcaccacccgataaagtcgcaacaggcccatcgatttgtcccgcaaagttcattttggtcagtaactgtttaatctcagcacgttgcggttgctgatgactcaagcgctgttgtaagacaacattttcaaagacgggtaaagactgaatcaagttgtattgttgaaaaataaagccaatcgtctgtctgggaagagccgctagttgattgggtttcaattgatacggattaatccccgcaattgccacagtgccgcctgtaggtcgcgtaatccctgaaatacaatacaacaacgtactcttaccagacccagaaggcccaacaatactgaccaactcccctttttgcaccgtaaacgaaatatttttcaataaggttgtcgtctggtcagactgcccaattgacaccacttgtgttagttgggcaaccgaaagtattgtgtttgtcatcctaaaaacctccccaaataaatcctgttcccgattcctcttcaatgtaccactttcatctggggaagaaacgcgactaaagacgcaaaaaaacgctcgactaaagtaatagtcgggcgtttttttgcattattgcatggcttggtaatcgtcatagagagtttgcatctctaaatcgtttggcacgagcttcaaatattgtttgagggccgctaacatttctgggacctgtgccatttcttggaagaataaaattaaatcgtgtagaaagtccgagttatctttcaagtcaggataagctaacagataattttcgcgcgcttggtcaacatcatccaccgccatctgtgattgcgccaatgaccaatataaatcagccgttggtttatgattttcaatcgcatcttgtaagaaagcaatgttttcggcatggcggccttgacggcgataaacttggctcaaggcactaatttcgcccatattatcaggatcaatcttgagggcctcgtttagcatctgttcagcaacctcgttattgcctaattgaagcgctagatcgctccccttttgatagaggacctcgttgtaggcatcgtacccaattccggtctgaacggtcgttaaggcgtcttctaattgattctgagcctcttgagctgctgccaagtaagtatatagtgacgtatattgtggatcagtcgtctgtaacttggttaagatttcaattgctttttgataatccttaatttgtaagtacaaaaagcccatctggaattgatcgtcttctgttagaaattctggcgtcaacccttcgtaaatctgcaaagcttcttcaaaagccccactgctggcataactagttgccaaccgcttttgaatattcacctgtcccagttcaacaacgtcttggtcgattagcgtctcatagtaattggcggccttcacatattcacccatttcaaagtacaattcagctaatgcgaattgcatgacgggttcatctggatataagcgcaacgccgtcaataatttttgttcactaacttctggtaagcccattgtttgatagacatcagctgccgtcagcagactttcggcgtacgcattggattctggcgtaatatctgccaacaagttcaaggcgtcgtcgtattggccatcgctgaccgcaatatctgctagtgttgttctgatttgatcttcttcaggaaattgggccaacaattgttggtaaattgtcgttgcttgttccaaaaaacccatcgcatataactcttcagctaagctgtagagcgtatcgggttcatcagcaactaaggcttgttggaagtaagtctgtgcttgttctaaattattatcttctaatgctgtaagcatttgttctgaattcgtcatttaaccaccctttttcgattgttccattttaacatattcggattaattgccaataaaaaaagactgggaaaaatcccagcctataaattgaattcttatttaacagaatcctttaatgctttacctggcttgaatgcaggtactttgcttgcaggaatcttaatttctgcaccagtttgtgggttacggcccttacgagctgcacgttcacgtacttcaaaagtaccaaagccgattagttgaactttgtcaccttttttcaaagtgtcttggattgaaccaaatactgcatcaactgcagcagttgcatccttcttagttaaaccagtctttgatgctacgccttcgatcaattgtgctttgtttgccatgtttttcacctcctgctcatcacagataatcagtaattaattaccgaaatcatttttgagtggtcaaaaatgacgaaacaatgatttgatcaccatttcattttttaatttatcacacaaacctagtgatagcaaggaatttcgctaaaaaacagcattctgagcaaattagttaatcatattagcggatttttgaaaaaacagcttattttcgttgacgagggatcaaatggattggtgtaccagtaaagtcaaaggttttccgtaattgattcttcaagaaacgttgatatgagaaatgaagcaagttaacatcgtttacgaagaccacaaatgtaggcggttgaaccgctacttgtgtcatgtaataaatgcgcaatcgtttcccattaatagctggagttggtgtcaccgttgttgcgtccatcaagacttcgtttaagagtgctgattggatgcgccggttttggttttcactcacttgttcaatcatcgctggcaagttttgcaagcgaacgccggtcttagccgatacaaagatgattggcgcatagtctaagtattggaattgatcgcgcacgtgattttcgaactctttcatcgtgtggttgtcttttttaagtgtatcccacttattaaccacgatgataatcccacgaccagcttcatgtgcgtagccagccactttcttatcttgttcacgaataccttcttcagcattcaaaacgactaatacgacgtctgaacggtcaatcgcacgtaatgcacgcattacggcgtatttttcagtattttcgtagaccttaccccgtttacggatcccggcagtatcaatcatggtaaattcttgattatcttcagccgtgaacttcgtatcgatggcatcccgcgtagtcccttcaatttgagagacaattacccggtcttcttttaacatcgcgttcacaagtgatgacttcccaacattgggacggccaatcaaactaaacttgatgctatcgtcttcttcttcgtcatcttcagctgggaacttagcaacggcggcatctaaaagatcacctaacccttgaccatgagcccctgaaacggcgatgggttcgccaaagccaagactatagaaatcaaaaatatcttggcgttgttctggattatccgccttattaaccccaagtaagatcggtttgtcagcgcggtataaaatttgtgcaactcgctcatccgcatcagtaaccccttctcgtgcactcactaagaagataatcacgtctgcttcatcaattgcaatttctgcttgttgtttaatctgttccataaatggtgcgtcactaatttcaatcccaccggtatcgattaggctaaattcatgccctaaccattcacttgtggtataaatgcgatcacgcgtaacccctggcgtatcttcaacaatcgagatccgctcaccggcaatgcgattaaaaatcgtcgatttaccgacattaggtcgaccaacaatggcgataactggttttgtcattgtattcattcccttcgttgttcagtgtaccctgtctgagccaaactgacaaggtcactccgacaaagtccgctgaacttccgcttcctctgcgtcgtactaatcaatcaccgacataaacgtagggtctgggacaaaacctagttttgtcccagaccctacctttttgcatatgacttttaaaaaaattatttatcgtctaatgttttaccaagcatgtcgccgatactgaaacctgtttcttcttctggcatcacatagtcagaaggcgccacatcttcgtgttctgaatccttagcaccagcaggtttttcttgcaatgctttgattgataaacctaaacgttgttgttcaggatcaactgataagaccttgacttgaaccgtttggccttcttctaacacatcgtttggtgtggcgatatgttgatgtgagatttgtgaaatatgcactaaaccttcaaccccagggaagacttcaacaaaggcgccaaatgttgttaaacgtttaacgaccccttctaaagtgctaccaactggtgctttatcagcgatatcatcccaaggaccaggttgcgtatctttaattgataatgagatccggcctttttcttggtctaagctcaagactttcacttgcactttttgaccaacttctaagacatcagaaggttggttaatgtgatcatatgaaatttcagaaacgtggactaagccgtcaacgccacctaaatcgatgaatgcgccaaagtttgtcaaacgagcaacttcaccttcaacaacatccccaggtaacattttttcaaaaactgcttgtaacttaacttgacgttcttgttccaataatgctttacgtgaaagaattaaacggttttcacttggttcaatttcaataatttgtaaggttaattcttggcctttaaagctgcttaaatcacgtacgaaacgatcagaaatcattgaagctggtacgaagccacggacaccagcatcgacgactaagccgcctttaaccacgtcgatgactttagctgtgattgtttcttgattagcaaatttttgttcaatttcagaccaaactttacgggcttctaagcgacgtttagataataagtagctcccgttttctttatcgttaccgattcttgaaatgaccactaaatctaattggtcgcctactttggcaacgtctgcgatgtcttcaataggttgacttgataattctttttgaggcacaaccccttcaacaccagttccttcgatgccgacaatcacttgtcgatcttcaattgctaaaacttcacctttaacaacgtccccaattttgacttcgtggacactgtctaaagcagctgccattgcatcgctgctttgggtgttattcaaattagcttcactcatagctaaaatcctccttaacgactatctatacagttactattttagttgatatctatttggattaccagttattttacctcgttcaaagataaaattacatatttttctttacaattgctaatattgtgtcgaccacctcatcgattgttaactgagttgtatcgatttcaatggcgtcgtcagctttttttaagggtgaaatggcccgtgtactatctttttgatcacgtaattcaatctctgcttgtagcgttgctaaaggcgtcataatccccttagctgtattttcagcataacggcgtttagctcgttcttgggcacttgccaccataaaaattttaaccttcgcagcaggtaacaccgttgttccaatatcgcgtccatccatgacgacttgaccttgatctgcaatctgacgttgccgtgcaaccatctcagtgcgcacaccagctaaagctgatacttgtgagacattattcgtaatttcaggggttcgaatggctaatgtaatatcttcaccattcaagaagactttttgccctgcttggtcaggtttaaattggatatctgcttcttttaaagctgctaaaattcccgcttcatccccgaagtctaaccctaatttctgtgctaacacggttgatgcgcgatacatagcacccgtatcaacgtatacgaaccctaatttagtagccacaattttggcgaccgtacttttaccagatgatgctggtccatcaattgcaatttgcatgttctgcctcctgaaaaaatcattaaaaaaggctgggagtttccccaggccttttggtagtactgattatttaacttttagagctgtgcctggtgccacttgtgaattggctgttaacccagggtttaatgcaagtagttgatcgagtgttaaaccgttattaaccgctgcgcggtataaaccttcgccggctttcaacgtataagaaccacccgttgtttcgcttgaactgctactttcagttgttgtttcttcgctactactattttgagcgtctgcttgagcttggctttgactattagccttttcagcttcttctgcagcttgtttgctactttcaactgcttggctttcactagccgctttttcactttcagcctgtttagctttactttcgctggccgctttggtagcactttcgctagcagacttcgcttttttagcttctttcttagaagcactatcactatcagaagtattaacgacaatcttactagactcgactgggcggttagcccggctagaatgaatcgtataggcaataatcggaaatgcaatcatcaaaacaagcaatacacctagaataatggcaaaatatgtatttcctttttccttactctttgaagcaacacgcgataaattcccgcgatcatcacgatcatcatcaaactggctttcccagggtttgtcttccgtctgattatctaattttttcttatcatctttgagcattgacggccctccctattggtattctttgatattgtaccatagacccttttaaaatacccagaaaatctctaaaacaattgcttcaaaataccgtcccaatggtctaacccgtctattttaggggatttatcatcagttaacgtttttaaattaaatttttctaaaaagaccgttgaatcctgttgaccacaacattgatcagcatgggcaacctgttggggttgctcgtcaaaatagttcacaataaattgccgccgacagccttgtaagtttaaataatcaaccattgtttgaagcgcaaaacgcttttctttttgccgattctgtaacagttcactaacggcctgttcatccatcccaatttgctgataccgccgtaataattcaaactcgttgccttggctttgtttaaataatgtcggttcttgatagaaacgccgaatcaatccagcttcaggaatcccaaatgacactaacgactgttgcagatacgtatcttgcggtgttgctaacaacattgcataggctggttggccatcgcgccctgcacgaccgacttcttgtagataactttcgatattttgcggtaaatgatagtgaatcacatagcgaatattggctttattaatccccattccaaatgcattcgttgcgcagattacgtccaactgcccttgcataaactgttgttgaataatgaagcgctcctgtggcgaaagcgctgcgtgataataggcaactcgcatcgctgtcttttgttgcaaaaaagccgcaatctcgacagtcttttgacgacttgaaaaataaataatcccgggcccctgactctcagttaccaattgttgcaaaaaggcgttcttactcgcttcatccgcttgttgactcacccctaagtaaatattaggacgatcaaccgacgtaataatcctattggccgactgcaaatctagcttggctaaaatatcatgccgaacctgtgcatcagctgttgcagttagtgcgagcgttgcccccggatttaattggtgcttgatttgcgcaagcactaaataatccggccgaaaatcaatcccccattgtgaaatacagtgggcttcatcgatgaccaataaatcaatctggcattgttgtagtgcttgaatgaccgccggctggcttatcgtttcaggcgccataaacacgaaacgatactgtggcaattgtcgcaataacgcatgcttttgccgcggttccaaatttgaattaatcgcgactgcctttttttcaccttggtaattcaactgtgcgacctgatcttgcatcaatgcaattaaaggtgaaataatgacagtggtatggcccaaaagataggctggtaattgataacataatgattttcccgtcccggtcggcaaaaccgccaaagtcgcttggcccgtcaaaacagattgaatcacttctaattgtcctggcttaaatgtctcatagccaaaccgctcttttagcgttttataaatcagttcatccgtgctcattgggcgttcacctgcctttgaatttgataaagccgatactcaaagaaatctagaccggggagtgcggtttgtgcttcattatagctgagcgatggctgttcagtcatcaatctagctagtttttgtgtagttgcatcctttaagaattgttcaaacggaaaccgtgggagtaacatcgcggtttctaaaaggtgttctttaatcgttccgatcttaacccggcgctggcggctgatttgtttaacactcgccccttgttggatcaattgccaggtctgtaacgtactctgactcaattgcgtttcagcctgatccactaattcattcaatagcggataagtcgtttggtgcgccaataaaagccctaaaatttgagcaaaggcgtcgatggtccgcacacgaactgtcaaggatgggctatctaaggcttgcgccagttgttggtggcttttgcccaagacttgatgtccgatcagttgatttgccacaagatcggcttgttgcggatctaactggtcaagtaattgcgccaattctagctggaattgactgctaaaattgatggttgccttatgccgcttaaaccaactgaccaccaacacgcggtccttcatactcgtttccaatggatagtactgcgtattttgatgatgatattccgacacaatttgaacggccaacataaaacgagcagtgaattggggtaagtgacccatctgtgggccttcatagtgcgtcggccaaactaattgcggctgccattcagcttgtttttgttgcccggtagcagtcaaccaaacataccgctcatcgatttcaatccaaccattttgctgaagtcgttttaattctgcttgaaattgtgcctgttctagattaggataaatttggagccattttaataatccatatgctaaaccggcatacagatttgaagtagttcgtttaccaattaaggtatagtagattgcttgataccgccttttctcaggcgccaacaagcataatagatacgccattaacatcatcaattaagtcctttattgagaaagtgtgaatttaatgctctatagtcaagtcatcccggaacgctgtatcgcctgcggtctctgccagctaaaggcgcccgacttattcgattacgatcaagaagggatcgccttttttaaacccgatcataatcagggaacgacgccaattgaagatcctaaagaacgaattgcgtttaaaaccgcctacaccgcctgtccaactggtgcgattgtacgccaatcaacgccatttttatcgtagcatatttacgtcctataaaaaaggttgtgcccgcttggacacaaccttttttgctgccatttatttggcaattggtttttgcatatgttgttttagccatggtaaaatccgtaaatataaaacggcaaacaccaccgttacgagtgcacctttaattaaattaaacggtactaatccaaatagaatgtatttggtagtcgacattcctaagttcaaacccatcaatttaatatagagcggtaaaatgaaaagccagttagcaaatgacatgaagatcgtcatgctgacagcccccgcaacaccagcaattgcttgacctactaaaacgttcgattgacgcttgaataaataatagaatggtaacaagtagcagattgacgccaagacaccggcaaagtcgccgaccaaactcggtaagctagcaccggtcataatgaaatgaagcgtcgagcgaatcaatgcgacccccattcctccaattggtccgtaaacgaacgtccctaacaggacaatcacgtcactaaaatcaatttttaaaaacggaaatgcgagaataattggaaattcgaaaaacatgacgacaaatgaaattgcccctagcattgcgaccccaatcatcgtacgaacttttgaaacttgcattactaacaccctccagatgaggttgccttcgtcagcggacttagccaagtctgattgcatcaaaaaggtctgttaatcagggagattaacagaccttacttgcatacattcatacccaaataagccctatcttcttccatctagactttcactatcggtactggaatcacaccagttcagccaccacaagaatcaacattgtagcaggtcgcggacttttaccgccggtcgggaattacaccctgcccctgaagacgaaccattaatattttgttcgaaataagcatagcaaatcaacgtgccaaaagcaactaattaatcatgccgtgataattttggtcgattcttatgctgtggtttttcatttagttcagcaatttttttgaattctgcgacttcgattggtttcaaagcacggtattcgccagaaactaacccatctaacgttaggaaaccatatgtttcccgtttcaactttgttacgggtaggccaaccgcagctagcatgttcttaacctgatgattcatcccttcgtgaatggtgatgcttacaatggcagtgttcttgcgccgatcagttgaaattactttgaccttggctggtgctgttttgcgtttttctaagacaattcctttacgcaattggcgcaacatatctgcagttggtaatcctgaaaccttcgcaatataagtcttgtcgactttatattttggatgcatcatcatgttggcaaaatcaccatcattcgttagtagtaataagccagatgtatcgtaatctaatcggccgattggataaacccgttcaacgatatcgccaaggtattcagtgacgacccggcgtttcttatcatctgtcactgctgaaatcacttggcgtggtttatacaagacataatagaccttgcgttcacgcgttaacggcacaccgtcaacttcaatatgatcgcttgtgctatccaccttgatacccatttccttcaccacttcaccatttaaggtgacgtgaccagttgcaattaaggtttctgctttccgtcttgaagctaccccagcatttgcaatcactttttgtaatcgttccatttattgttctcctttggacgtctcttccgacgtcgtatctgtttcatttaacgtttgttcaaattgacggtaatacaagtctgctgtaccaccttcactaccatcgacatcagcgtcaagtgccaattgttcaagtggtggtaattcatcgagcgattcaagaccaaagtaatctaagaaataggtgctcgttccatataaaattggccgaccaggcgcatccttacgccctttttcgctaattaattggcgggctaacaaggtttggatggccccactactttgaacacctcggacctcatcgacttcaatccgcgtgattggttggcgatagacaataattgccaatacctcaagagcggcctgactaatactagttgacaccggtccatcaaaataggtcttcaacaacgtcgcgtattcttttttggtgactaatttatagatatcttcggcttgaatcaggttcaaacccgattcagtgttgccgcggtaacgatttgccaatttttctaataactggcggactgccggttcatcgagatgaataagttgcgcaatttgcgcaagcgcaattccttcgtcccccgcgacatataataaactctcaatttcagcgagatgattcaactgaaatgccctccttcaaccgaaccatgattggtgcatcatagtcggcttgttcgcaaataatttttcgatccttcatcaattctagtacggctaaaaatgttgtgacgatttcatctcgatctgttttaacaacgaccaacgcttcaaaagcaactggttgagcggctaaatgacgcacaatccaactcattttatccgtaatcgaaatttcgtcattttggaccgttttgaagaccggttgtttagcttgggcttcgaccaacattttagaaactgcggccgctaaatcgcgtggcttaatcacgccgcgcgccagtgggaccactttttcagctggattactactagctggcttagcaaagagctgttggcgctccaattcgcgctcttgcaaaaccgttgcgaccttttggaaggcttggtacgccaatagttggtccactaattcctgccgtggatcgacgtattcttctgtttcttcttcaattaattcaggtgccttaggtaagagcaacttactcttaatcttcatcaacgtcgccgccattactaaataatcacctgcaacatctagtttcaatacttgcatttggtgcaagtaatcaagatattgcgcggtgatttcagcaatgggaatatcataaatatcaatcttagtttgcttaattaaatgtaataataaatcgagtggtccttcaaaatcagtcaagaccaacgttaattgttcagtcattggtcaatctagtccatttctgtattctgatgttgttcccatttagcaatcaatggcgcagtctctaacgaacccatcacgcgactttcaggataaagcgccgctaattcatccaacatggtgaaatagttcccgtcgctacgttccgaagggttcagtgaaatatggcgcactaaaatatagtccgcacccagttcaatccccacaacaccggcaaaatcgccggcttcattgcgccataaatataaattgcgttgctcatccgacgtatagagcgccaattcagcttgtacatgactgacttcttttaaatccggtacgaaggataaaaagcccatcgcaatcttttcataatcatttttatacttgaataacatgttgacctccattgatcaaacaaagttctaatagcattaactctaccatagtttataaagcgcgacaaatctaatttaatcgcgtggatgactccattggtaaacttctgtcaaatgtttcttactaatatgcgtgtaaatttgagtcgttgaaatatctgaatgccccaataattcttgtacaattcgcagatctgcgccattttcaagtagcacagtggcaaacgaatgccgcaatgtatgtggggtcacgtctttttcaatcccagccgttttaacatgtgccttcaggttcttccaaatcccttggcgcgtcaacccgttaccatggaaattaacaaacaggtacgggttagcacgccccttcgttaattgattccggctacgatcgaggtattgattaatccaatcaaccgctacatcaccaatcggtataatccgttccttattccctttgccgagggtctgaattaagcccagtgataaatgcaaatcagccatctttagatgaatcagctcgctaactcgtaaccccgtcgcatataaaacctctagaatcgctcgatctcgtaatccaagtgcggtgctcgtatctggtgccgccaatagtcgctcaatctccgccgtcgataaaacagccggtagatgacggccttgtttgggcgaatcgatttggagcatcggattttgtttaatctgcttttcacgcgctaaatactgatagaatttacgtaacgttgaaatgctccgtgtaatactactttgtgccttatgcgcatcagtttgttcttgcaagtagttcaaaattaaaaagcggtcttcagtaaaattggcaacctgctgacgttgtaaaaacgccgcaaactgttgtaaatcctgccgataactctggcgcgtattctccgaaagaccgcgttcaacttttaaataatgtaaataatcttgaattaaatcatccatgtgcttcctcttttacaactgcgtcacgtcaatttggcgactaggatccagttgattggctggtaacccattttgttggttaatctgttggcaacgtgcacagatcccgtgaaatgttaaacgatgatctaacaccgtaaatgtgtaatcatcatatacctgttgttccacggcaggcaataaatccgtatgaatttcttcgattgccccacattgcagacacaacaggtgatggtggaaatgatggtcgtgatcagtctcacacaagtcatagtgggtcatcccatcttcaatgaaccgaactttattcaacacatgcagttccgtcaacatctcaagggtgcgatacacagtggccaacccaatttcagggaccacctctttagttgccataaaaatctgttcggcactcagatgcgcttgggcatggtccaaaatgaccgccaccgtcgcagagcgttgtgctgttaacttgtagccggccgcttgtagctgctcggatattcggtctaattgctcagctttatccatttagcaacttccttttcaatcattcaaaaaagcttagtcttgcttctcgtcatctgtaattggggcaatatcagcttgacctttttcagttaaactcgttaggccctctgcttgagtaattaagccatttttcattaaccggcctaatgcccgcttaaaactgcctttactaatcccaaagtaactcttaatcgcttctggatcgctccggtcagtgtatggcattgcgtaatcaggttgccgttttaagacagccataatcatttcagcatcgtcgccaatttcttcatatgcccgtggtttcaaactgacatttaaactaccttcaggtcgcacaccaatgacgcgccccttaacctgttgacccaaacgtggttctgcttcacgttcagaaggatgaatgaacccaatgtaaaagtcatccgttaaaataaacgtcccggctaacttcaaacggtagaccgtccccatcacgtcttggttcttcatttctggtttagcaccttttgaaattgatctgaagatgctttcgtcagctagttggccccacatccgccctttttgatcgacttcaatcgcaatcattaaacgatcacctggtttaggccataatttcgtaatggttggtaaaatatccagtgatacgacaatatccttatctggcaagccaatattgacgaaaacgcctaaatcacgccgcgtttcaaccacttcaccaaaggcataatggcccacgcgtgatttaggaataaacgttgataagatcaattcccgacttgagttttcataagcaaaaccagtcaccgtttcaccgattgtcaattcttgttctaaagtttctttttttaattcaaatgtcacgccgtctttttggacaaagaaggctgtttcattttcatctgttactaaggcagtaatgacttgcccgattaattcattcatagttaacctcttttattcttattaattaatgaattggtactaaattaaagaccgttaaaatggtataagtaatccccgctgcaattacggggccagccgcaatcccttttagaaaaacgacacccatgatggtcccaaaaaccaaggccactgtcatctcaggactagcggacaatagccccacacccttcgctgatagtacagcaactaacacgccacaaccaactgcaataaaacccgccggcgttttaaaggcattgattaagtctttgacaccaatttgccccgttgcaatcgggactaggatagcaaccgaaatcactgtcactccccaattaatgcctttggcttggatcacaggcagcaccttatttgaaatcgggaatacctttaatattaaaacaaccgcggtcgcaatgattaaagattgatttttcgctaacaatgcaacgattaaaatcgctactaaaaataaccaactttccatgtaaacctccaataaagtctccctactattgtaccgataaatgaacgacttgtcagtattttcagaaaagtaattcaagattcgcatttttaaaacaaaaaaagccccctcttttcagagggggcttcatttcatcattcaggaatgattaaagagcgtttgttgcaccgcggtaaacaatcccacgacgtgaatcaacagtcacaacttcgccatctttgatagcttctgttgcgtctttagcaccaacaacaactggaatacccatagcgataccaacaacagcagcgtgtgatgttaaaccaccgttttcaacaacgatagcacttgatttttcgattgctggtaagtaatctttgtcagttgatttaacaactaagataccaccatcaattgctttttcagcagcttctttagcgtttgaagcgacaacagccttgccaacgattgtttcatcgccaacaccttggccttgtgttaattttgaaccaattaattggatcttcataacgtttgttgtgccacgttcgccaacaggaacaccagcagtgatcaagattaggtcgccttctttagcaaaaccatgttcttgagctgtttgtgtagctaagttgaacatatcatctgtattagcaggtttcttagcgataactgggtatacaccatagttaactgttaaaccacgacgtgtacgttcgtcgaatgtaacggctaagatgtcagcttgtggacggtatttagaaatcatacgtgctgttgagcctgattctgtagcagcaacgattgtcttgattcctaagttacgtgcagtgtgagcaacagcttggccaattgattctgtcaagttagtcttgctgtatgctttcaatgcgtatgcatcgcggtctgttaatgatttttctgttctttcatcaatgcgagccattgttgcaacagcttctactgggtagtcaccgttagcactttcacctgaaagcattgttgcgtcagtaccatcaataacagcgttagcaacgtcgttaacttcagcacgtgtaggacgtgggttttcttgcattgagtccaacatttgtgtagctgtgataactggtttgccaatagcgttacatttcttgatcaagttcttttgtacaaaaggaacattttcaaatggaatttcaacacccatgtcaccacgagcaatcattaaaccatctgaaactttcatgatatcgtcaatgttgtcgataccttcttgtgattcaatcttagggaagatttgaacatgttccatgtgtttttcttctaataattcacggatatctaaaatatcttgaggtttacgaacaaaacttgcagcgataaagttgatttcatgatctaaaccaaaacgaatgtcgctagcatctttttctgtgataccaggtaagttgattgaaacaccaggtgcgttaacacctttacgtgagccgaccataccgtcgttttgaacttcagtaacaagttctttgtttgcttcgtctttttcaataattttaagatccactaaaccatcatcgattaaaacgtgtccgccgacatgtgtgtcgtcgtatagacctgggtaagtaacagcgattttttcaggtgttccttcaagtgtatcgtccattgaaatacgtaccacttcaccagtgtgtaattcaaatttcttaccttgttgaacagttgtccggatttcagcaccctttgtatctaacatgataccaactgttttaccagttaatttttcagcttcgtgaaccatgttcatccggcttaaatgttcttcatgatcaccatgagagaagttaaagcggaatacattagcacctgcttcgattaattttgtgatagtttcaacattgttacttgcgggtccaagtgtacttacgattttggttttcttcataagtggaatctctccttttatgtctattttttaaaagacttttcagtcgttttaacaattttatatatggaacgatgaatctagtaagctaaatcttcgtttaaatcataaagatctaacattgcgtgatgcttgtgattgaacaagtctaacatatcatgtgcgataatttcgttcttttcaatcccaagtgcaacgccacctttgccttcaagcaataattcaactgcttttgagcccaaacgacttgctaacacacggtcactagctgttggtgccccaccacgaacaacgtgtcctaaaacagttgaacgtaagtggaaatcgccgtattcagaaagtttttctgagaattcatcagcgtgcatcacaccttcagccaatacaatgacagcgtgtttttgaccatgttcacgtgaagtacgtagcttatcagcaacggccttaacgtcgaaatcatgttcagggataataatgtcttgtgcgccaccggcaacaccagcccaaagcgcgatatcaccagcgccacgacccattacttccacaacgaaagttctttcgtgactagcagctgtatcacggatccggtcaattgattcgagcactgtgttcacagctgtatcgaaaccaattgtttgatctgtaaatggaatatcattatcaattgttcctggaagaccaattgcgttataaccatgttcagttaaacgaagtgcaccgtgataagaaccatcaccaccgatgacaactaaagcttcgataccaaacttcttgagttgttcaatacctttcaattgtccttcgacttgtgcaaattctggataacgtgctgagtacaagaatgtcccaccacgttgaatcttgtcaccaaccgtaattgggtccatcttgaagatatctccggcaactaaaccagcgtaaccataattgataccatagacttcaaggccttcatgcattgcttttcttgcaacggcacggatggcagcgttcataccaggtgcatccccaccacttgtcaaaatacctatgcgtttcatcttttcaccccaggcaaatattttacttaaaaaaccaattggtctttcaaagtcactaatatattatcacttttcagaaaataagtcttgtcttttgcgaagattttcgcaaagatagaccaatttctttattggtcaaacccttttaaaatcacatttcccgtccctaaaaggtttgtaagcgcggtcgttagtttttcgttgctcacaacccaatagcgctcgttcaatagaattgactgtttatcggccgcattgtacaagataactggcgttgttccgtgattttgttgtaacaattgatacatttgttgttgcgcttgactcgtcaacgccgtttgaacccgtaaataaagggtcgctttgggtagcgtcttttgtgcatcttgtgccaattgaatctgattagcaaccacttgtaaatcgcgacgttgttcaactttcccggtgataaaaacaacttgtcctgtttgtagccattcactgacccgttgataaacgccagtaaagagcgtcacactaatttcaccggttgcatcttgccccgttacaaacgccatttgatcgccttttttcgttcgaatcaccttaattcggcgaatgaatagcaccaaatggaccgtttgctcgggtgccaaatcactgatatcaggcacatggtagtgttggcgtacacaatcatatttttcgaccggatgtcccgaaacataggccccaagatattcggcttctttatccaatcgttcagtcaaggttaaattcggtacggcacgttctttcggtgctaaaacagcaaataaatcgacgttattccctgacaacttcacactatcaagcaggtcggctaagttggtcaacagcgcattccgattcggattaaactgatcgaaggcgccactataaatcaaggcttctaatgcctcttgcttgagaaacttaggatccatacgctgtaagaaggccagtaacgatttaaacggtccgttcgttgtccgttcttgaataatcgccgccacaaaatcgcgccgaacttttttaatgctgaacaaaccaaagataatccctgagtcggctaatctgaaataactttgactgcggttaatatcaggtggcagcactttaatttgacgtttcttagcttctgctaagtaagttttcgtttttgtcggattgttcaaaacggcatttaataaagctgcaaaaaaggctgctggctgatgaacttttaaataagccaaccagaaagcaattttactataagcaacagcatgtgaccggttaaatccataattggcaaaccgctcaatatagtcgtagactgtcgtagcagcagtttctgtgtgcccgcgttcgagtgcgccttgaataaattgcgtccggctagcatcaatcaccgccttcttctttttactcattgctcgccgcaataagtcggcttcgcctaagctaaagccccccatcttggacgcagcctgcataacttgttcttgatacactaagatcccatacgttggctctaaaatatcggctaacgacgcgtccggataagtgacaggttcttgcccgttcttacgagcgataaatacgtcgatgttttccatcggacctggtcgatacaacgcatttgtcgccacgacgtcttcaaaagaactcggtgccaaccgccgtaaaacattcttaatgccaagtgattcaaattggaaaataccattagtatcaccttgttggaataatgcaagtgttttaggatcatccaacggaattgagtgtgggtcaaacggctgtcccgtttgctgtccaacaagctttacaatattagcaagaatccctaaattacgtaatcctaaaaagtcaatcttcagtaggcccagttcttccacgttgcccattggcaattgtgtaagttcaatctcttcaccgccactttgtaatgcaaccgtatcagttaacggtgcttggcttaacacaatcccagccgcatgcgttgagtagtgtcgtggcagtccttcaagtttctgtgctgtctcgaatagtaatcgattttgagtggaatcggccaccaaatttttcaatggttgtgattgttgataagcttcttttaacgtgattttcagcatgtccggaattaccttagcccaatcattcatttcaaactgacttaagccaaacacacgccccacatcacgtaacgccattttagctgccagtgtgccaaatgtaataatttgcgccatatgattccgaccgtatttgtgatagacataggccagcacttcatcccgacgattatctgggatatccaaatcaatatctggcatattcgcccgattggggttcaaaaaacgttcaaacaacaattgatattgaatcggatcgacatcagtaatcattaaagcataggccaccaacgaccctgccgcagagcctcgccctgggcccgtcataatatgttgttcatgggcatgccgcatgacatcggcaacgattaagaaataatcggcaaagcccatctcgttgatcactcgcaattcatactgcaagcgttcttgatattcttgcggaatcgcttgatcggcaaaccgaacttgtaagccttgctgacttaactgttctagatatgccgttgccgactcttgatgcggtgtttcaaagcgtggtaattgggcccgcttaaaggtcaactcaacttgacagagttgggcaatcttatccgtattgtacacggcatcgaccaactgcaatgcttcaaactcggccgtaatctgatcagcagcttgtaaataatagccgcctggcgttgtctgatcaccactatggagattaacttgcgtaccagctttaatatgttgtaagacttgcactgaaaaagcatcatctggttctagataacgaacatcacctaatgcaaccagcggaactccggtcgtctgactcaatgcaattaacccgctaagttggggggctgctgctcgcttggcactgattcctaagtacaagctccccggatcaactgccgcctggagttgcgtcaaatatgccgttgtttgctcctccgcttgcaaaagtaggcggactaattcgccatcttgagccggcgtgatcactactaaatggctgaaccactgtgtaatatcagcaaatgaaaccagatcagtttgagtcatcactttagaagaaagcttcaaaagattctgatagccaactaaatctttcgccaatacaattagcggaaaccgttcatcggtttgaagtaatccgccaatttcaagcgttaaacccaagattggatgtaagtcagctgccttggccgccttataaaaatcgactagcccataaatcacgttcttatccgtcagcgcaatactctgatagccgcgcgccttagcactttcaatcagtgcatcaattttagtggtactttccaagagcgtataggtactcttaacctgtagttgaacgaatggcaagcaacgccccttctttcttcgttaattcgattactcttagtataacaaattatttcaaatgattctctttggaaaacgtgttacaatatcatagaattgaatcaaagaaagaaggccaactatgaaatacgttatgaatctactttggacattgatttttgggtttgtcattggatttatcggttctaaactaacgaaaaccggctttaacattcaaacaactgttatcgtctcagttatttttgggcttttgctcaacttcttacctcttgtcttaccaaaagatccagctaaataaagcacaaaaaagggccgcaactttatgttgcggccctttttacgtttattttgtaatgtaaatatacaaatcacttgttgaaaaaccggtattgaacttcacaccatttgattcaatcgtcttcatcgtggtttgactaccttttttgtttttcttcgtataatcgctaaattcggacatcacttttttggaatcagcgcccgttgcttgcgcaatcaatgcaaaactggtcccaaaatctttcaatgccgctttatctttgagcgctttaacgggtgtaatgagcgtcatccccattacatcttgactatcaacagaaccgcgaatggtgacatgctttgttgcgacccattcagtcaccccatttttaggtgtggttggtagcaattgatccttttgtgtctgttgcacctgttgcattgctgcttgtacttcctgttgccgctgcttaagtgtcatcagatcagcaggtgcaagttggcctgctttggcagctgctgcttgtttttgcaattcctgcgctttggtttgatctgccttagataacgccatcccaattaaagcctggttgtattgcgcggcaatcttggcatattggccaactgatgtgcccgctgcaatcgttaccttcttttgaacggttttaccgtttgctttagcttgtaccgttactgtttgtttgttagtcgttgttggtacttgaatcacataagttccgtctttgaccgttgctttttggaaatgattatgattaatccggtattgtaaatcagcttttttggttgttgaaccttttacgactgccaccattccattttggcgataatttgttttagtcgttgttaatttggttgtcccacaaccagccaatagaccgattagccctaagctggtcactaaaccaacaattgtttttttcatattcgtcaccttttcattgaaatttaactcattgaaatcttagattaacccttttagaatcacaattcaagcgaaaacgacgaagtgtcacattttttaagaccaatcaaaaagagcgaccacttaacggccgctcttttaaaaacttattttaaatttgttttcttttcataacggttaaacatatataatgcaacaattgtgaagaagatagggccagcaactgaccagattgtttgacttaaattaccatcaattgctggctgaataatcgtaaagacgttcgcaaaaccaactgtgaacatgaccatgcagacacagaatttatagaaggtcttccctttataaattgtaaatggtttttcgatactttcatcctttttaaagccaaagtatgagtatgccacaaacatgtatggcaatgtcattgaaacgtttgtcatcgctgttaagatatcgaagaacttagcagcactcttaccaccaaaagcaacgaaggcaataatcacaattacaattgcagcttggaccttcattgcattgaccggcatattattactatttttcttagtaaatgacttaggccaaaaggcagcaggtgtcccttcgataattgtttttaatggtgagaaaataattgtaaagaaagccccactaagtgctaagaacattgaaagccccatgtaacgactgagccaaatcccaacttgaatagcagcatgttcacttaagtgcattgctaaccctaattggtaacccatgttgttcatggcaatataagcaacgttccccaaagtaacggttgcgtttgaaccggttgctttggcgaagccaccaccattggtaaagacgaagttccagttagtgaaagtccccatcataaagatcccaacagcatagccgacaacaatcacgacagcagaaatagctaacccttttggaaagttaaccttagcgttttcagtttcatctactaatccaccaacaacttcaagaccaccataagcgaagatcgcaaatacaacgaaactgaagacttgaatcatcgatgtatagctttgatttggtgattggaagaatgcatgggttgtaacaggttgtgccattacccctttatttaaaacaaggattaacaaaccacccaagaataaaatcacgttgattaacgtaatggctgaaccaccaatactggtgattctcttgattttatcaaggccttttgatgtgacaaaggtaatgacaatgatccaaataatagctaaaattcctaatgtttgcacaccatttgtcaaaccaaagattgaccattcttgtgttttatcaaccccgaaaaaggcgtttgataatggaatccaaatcccgttcccgacgttaaccatccagataatgtatgaagcaaaccacataaatgtgccgacaaaggcaaatttagcgttaacggatttctccatccaagagtaaatccccccctttgcttcaccaaaggccgctcccatttctccgagcataaatgcataaggaataaagaaggtaacagctgctaaaacataccaaaaaattgatgcatatcccatcaagtagaacgcacgtgggatattcgtaaatccaaagactgacgtaaagaccattagaataagcgcaccaagcgttaacttattcgtcttcttcttttctgccacctaaaacacctctttcatttttttcagacttaaccacaatgattaatcctctgaataaaaattagttaactaacatttgttaataaactaattagttacctttattttacggcgaaaatagaaagaggtaaacgaattcattatttttgtaattgaattatttgtgaatcttaattcaattctcattttctagtcaattacttattttttgctggcgttttttcttcaactggttctttcttcaaagtaatcccaattgcaatcttatataccacactctgacatgctaatttcagcaatgtttgttgggtttcagtgaccaatgtacctgctggatttttgccttggtcataggggctgtaatcctcatctaactgatgaatcgctgctaaaaacgttaagataaagtaatcataaagttgcttttcatttcggttaggtgtttccgctgtcatcaattgtttgatttcttcaatcgaaaaactcgttttcaatagtgcaataattaaaacttgagcaatttgcgattttgtataccgttttttaatcggtgctgccacaatttcttttttgacgtaattattaatcattgaagcggtgatttcatctaaatttaacgcgtttaggtattgattgatgtaactaaccacttgatccatatatagttccaaatcgggcaggtctgtccaacgtggtaagcgtacaatttgtaaacgatcgagcttttgtttcaagtgttcatttttcataattatcaatctccttttattcaatactcattataccaccatctagtatttaaaactaggaaactgcataaaaaaagagtttcttattcagaaactctcgatgacgattagtcgttagcttttggtgtaacaacttgttcgcctttatagaaaccttttggtgatacacggtgacttacacggtattcgccattagttgcatcgaattgtacgtttggtgtgttcaatttgatatgtccacgacgcatacgtttcttcgtctttgatgttcttcttgctggaactgccattattttcagactcctttatatcttagattcattaatgatataccgaactcggggaatttggcaaggattatctcaatcccattcaaattgattttaaatcatcacgtgtcccgctacttttgtccgcgacttctataatactatgtttatccgctaagagcaagtcaattacagaaaaacaattgattaacgactcttaatgacaccactttcaaagtggaatcgtccttaatcgtcactaacattctgtacatcatccctaataagtgtaccatacaaacatcaatctgacagtaataatccctgattgatgtccaaaaaaagcgccgcaaattaaatttgcagcgctttttcaatcgttagcgattttcaaaaactaactggttatcttttaagttaatttcaaccgtggttcctggtaacatatgcccggcaataatttctttagccaatggggtttcgatatggttcgtaataaaacgccgtaatggccgcgccccaaatgcaggatcgtaaccttcttctgccacccattgtttagcagcatctgaaatcgtcaatgtcaattcttgatctgacaaacggtctgatagatcatgaagcattttgaccacaatcgcttgaatatcgttcaagctcaatggtgtaaacataattgtatcatcaattcgattcaagaattctggcttgaatttcgtctgaattaaggcttgaacactttccttagccgtttgtgaaacttgaccttcttcatctacaccgtccagtaggatttcagaacccaagttagaagtcataatgatgattgtattcttaaagtcaaccgtccgtccttgtgaatctgtcaaacgaccgtcatccaacacttgtaataaaatgttaaagacatctggatgggctttttcaatttcatccaataacacaattgtgtatggattccgccgaactgcttcagttaattggccaccttcttcatagccaacatagcccggtgcggcaccgaccaatcgtgatacagaatatttttccatatattcactcatatcaatgcggaccatatgccgttcagaatcaaataaatcctcagctaaagcttttgctaattcggtcttcccaacccctgttggtcctaagaagaggaatgagccaagcggacggtctggattttgtaagccagcccgtgaacgtaatacagcatctgtcacagcattgacagcttgatcttgaccaattatccgttcatgcagaacatcggcaagacgcagtaatttttgtcgatcaccggcaactaatttggcgactggaatcccagtttgggaactaaccaccgttgcaatttcattttcagtaacggattcctgaaccatccagtcctctggcttttcagccttttcaaggtcggcaaggtcttcttctaattgtggaattgtgccgtgttgcaacttagcagccgtttctaaatcataatttccctgtgcttcttctaattgccgtttagcagcatcaatttccgcttttttatcattaatgcggttcaaatcttctttttcagtttcccaccgcatctttaaattattcgttgtttcgcgtaaatcagctaattgtttttgcgtctcagccaatcgtttttgcgaagcggcgtcggtttctttctttaacgcttcttcttcaatttcaagttgcattaattgccgcgttgcttgatccaattccgttggttgtgaattcatttcgacgttaatgttggcactggcttcatctactaagtcgattgccttatccggtaagaatcgatccgtaatgtagcgatttgacaacgtcgcagctgcgactaaggcattatcgtgaatccggacaccgtggaaaatttcaaaccgttccttcaaaccacgtaaaatactgatggtatcttcaacggatggttcttgaactagcactttttggaaacgccgttcaagcgccttatctttttcgatattttgccggtattcatccaacgttgtcgcaccaatcatgtgtaattcaccacgcgctaacattggtttcaagaggttcccagcatccatgctaccttcagtcttaccagcaccaacaatcgtgtgaatttcatcaatgaagaccagaatccgaccttcactcttcttaacttcctttaacacagctttaagtcgttcttcaaattcaccccggtatttggccccggcgattaaagtccccatatccagtgaaataattgtcttatcttttaaattatcgggcacatctttacggacgattcgttgcgctaatccttcaacaatcgccgttttcccgacaccaggttccccaattaaaacggggttattcttggttttccgtgacaaaatccgaataacatctcgaatttcttcgtcccggccaataactggatccattttgccagaacggaccgctttgattaaatccgttccgtatttttcaagcgcttggtaattatcttcttggtttttagatgtcacacgctcgcctcctcgtaaatcagtaatgactttctttaatttttgttcagtgacattttgtttctgtaaatattgaacaagtgcctggtatttcaaacccattaagcccaagatgaccgtctcagttgataaaaattcatcttggaattctgttttgtatttttcagcagcagttaatacttggtacaagttttgtgagatgttttgaccgtaattcgtttgaccttcaaccgttggaattgcgtcaatttcacgatcaatctccgcctcaagagcatcgatatctgcaccggcttcttggtaaatttgccgtcctagttgttgtggttggactaaatatttaaagaggtgtggaatatcaatttcagtttgatgacgcgtcatcgcgattttctgcgcttctgcaagtgcatcttggacagcttgtgtcatttgttctggattcatagacgtcattcctttttcagttattttttaaattaagtgtcagattattctgactaattctataatagtcaaaataggtcaaactttcaagtaattcgcttataaatcagacttaagacggagagctggtaggcgagttcttcctgaaaagtaacacaaaaaagaggctaagacaaaatctgtctctgaagtgaacccccgatattggaccaaaatccaatatcgggggtttttatattgaccaaatattctaaaacattaaaaataaaagttgttcaggattatctaacgtcacccttaggttataaattaatagcgagaaaatatggtattaagagtaactcactagttgtctcgtgggttcaacgttataaggcctttggcccaaaaagactgcggctcttacaatgtcttaccgttcttgttttcgcattccttgacgctggaatcaactccggatttgccttcactggactcttcactagcaatacgcaatggatgatgatcttcgcgattatcccaatcctcttgtacaacggacaaaaaggacgtagcatgaagtatttcttctacttgttctacccaattcacatttggttattattcattcttgcttcattaatgggcgttggcgaataaattattgattctctatgtaagctaaaaactgtaaaaaactcgtttaagtatgtcataatatctttggtaggaagttattaaatttatcataacttttcatctcgtccagaactgacgacgcgaaaagctgataaggagaagggggttttacatcatggttaaatcatatcaaagtttttggtcccggatttttgatttctcaggcacttcaaaccgacctgatttctggtggccaatcatcattaactacattctaggtggtattatcatcggtattattcaaacaataaccggccatccaatttcagaaatctataatattggggatttaggcatctcaatgggtcgtaacatcgtcgtcttcattgtttggattgcaactttatccgttaaaatgcgccgacttcacgatacagaccgctcaggctggtgggtactcattgaattcataccgcttatcgggacaatttggttctatatcctaatgctcttaccaacaaaaacaaaccgttgggcataagcaattaatgtaacagtcacacgtgtggctgttatttttttgcaaacaaaaaaggcgattaacaccgttacggtagtgttaatcgccttttgttaagcgcctaattctgcttaacaccttgttatctaatggagccggcgggggttgaacccgcgtccatgcgcattgccacgtcaatctctacactcatagtcgaacgatttaggagttcgctagtccaaaacgccgtccgacagaagctcggatgaactagctagtttgcaaatctcttttaaacacctcaaacggcagcgtttaacgtaacccaattaatttgagacccggatctaacccttgggtgaagtcaggcggatcacgctatgctggtgtttaggcagctacagcgtaagaattgttattgtttgcagttataattaactgtaacgttgttaacgtagacgtaacctacgaagtgcaactcacgctcacctacacatgtcgaatccgtaacggccccgatatgcaaatactagtttagcatatcagccagtaatatgaaagactttaaccctatttcaccactaagcgtttcttaggaaaccggtcttttaaaaaggtttgtaatttttctaccgtcgttttaaagcgcaacttggcaatccgaatttcaccgacataaaaacaagcttcgactaagtcaccttgtgttagtaattcaatcttagaaatcgctgcaaattgatgaatagtatttaagtttgcaatcaaacttgttttggttaaaccacgaggccaaaaagcaatcacaattaaaattacaacagagccgatacctgtgatttgatcgctgagcgttctgcccatcactaacgttaaacctagtaagaggattccagcacaacataaaaaaatcgtccatagtcgattccgttttgcgcgccaaaccattttcgtttcaacaatcagccagataatgagcaaggcaattgccaataagccataaaataatgtaaaacctgtcatattcccattccctccactaaaaaatgaccagccatgcgctggtcattttcactgatgccttagacgtggccaatttcaacaacgtctctggcaatcattacttcttcattagttggtactaataatactttaacgcgagaatcgtcagcgctgatgacgcgttcttgagccatcacgttattgcgttctggatcaactttaacgccaaagaaactcaagcgatcggcgatgcgttggcgcattaagatgtcaccttcacccattccggctgtaatcactaggacatcaagaccacccataatggcaacgtatgaaccaacatacttgattaaacgattgacgaagatatcaattgccaattgtgattctggacgttcttcacgcgttttttcaagatcgcgcatatcaggagataatccagaaatcccataaatacctgatttagtattcaaaatatcgatcatttctgctggatctttaatgtttaatttttccattaaaaatgcaacgagtgatgcgtcaatgtcccctgaacgcgtactcattgtcacccctgcaagtggtgtaaagcccatggatgtatccaacgatttaccgtctttaatagcagtcactgaaacaccactaccaagatgcatggtaatcatctttaattcttccaatggtttgcctaacatttcagcagcacggtgggaaacataccgatgactagtcccgtgggcaccgtattttcgtgctccatacttgtgataatattccaacggcaaactgtaaagataattttcttcaggcatcgttgtatggaaagatgtatcaaaaacagcaacctgtggtacatcatgtaaaatcttgcggaaagcacggataacacctgcttcagcaggattgtgtaatggtgcgtattctgacaattcttcaatccgttttaatgacgcttcatcaattaatgcggatgacttaaagtcttccccaccggcaacgacccgatgaccaatcccactaatttcactatattcattgatgattttaaattcgattaacttcttcaataacaaatcaaccgcaacatcttgcgtcttaatatcctgggtcattgagaatttttgaccatccccgtatttaacggtaaagactgaatcggataatcctaaacgatcaaccatcccttgtgcgacaacttgttcttcaggcatgataaataacttccatttaagggtagaactaccagcgttaattgctaatacttttgacatctaatcaccttttctattcgattattgtaaattatctttatgccaagtccggatcttctgtagatacgttgcaaacgccttttgatcgttagaatttggaaattcacctaataaaatttggtccacttgtttagccccggcaccttgtttttgaaggactaaaattgctttttgaccttccttagtcttaaacaagtttgctggtaaactcaataagccttgcaaatagacatgttttgtcacccatttaatcagttgcttagcttcatccgtttccaaaatcacatttggtactaggaaaaagccatagccgccttctttcacataatgcatcgtttgttcaatcaacaagtgatgtgcatatgaatgaccactggcagcgtgggtttcaaaatcagccgcccgttcatctaatggataaaaaccaattggtagatccgcaacggcgatatcaactggtttaaccagtagcggttcaatcgcatcctgatggaaaaaggttgttgaatgcttctgcaattcactactgatgcccgcaatttccaacaaactatcatcattatcaaccccaaaaccttgcacggtattccccgttagtttttggatatgattgattacggttgccaataagttccccgttccaacaactgggtccaaaattgtcttgatttggtcagcaccaccaaaaacctctgccaaataagctacaagatagccgatcgcatctggtgtcatttgcttgtttggttccactttaacttgacgcaaacccttgagcgttgccaactgtaatgcttggcgaatttcttctgcttcaaattggttgagattaaccgccgcataaagcggttctagttgtgcaacagtggcagcatctggtaagccgtcttcaacctttacgcggccaccatctgcaatattagcaatggtctcggtgagtgcatccaaataggttgtttctaaattcttttcaattaattgtgttgtttgatcgagttgatcaaacaacgtttctacagcactcttaggcaaaatagccacctctattcattagattcctgttatattctatcggtattctaacggcaaagcaagtaatacaggtgggtatacctagaattataaatcatagtaagcgctttatcaaatagaaaatttatccttgatctgtttcattctgatctggaaactgttttcgataaccattgtttaactcaatgatgattaacttgtgttgctggtcgatacgactcttaccgatgttagtctttataccttgaattgactgagtttgccgcgctttatttgttaatttaagcaagatttgcgtttggtaatagttagtcaaactgacgtaactctgttgttgctgttggtaactgtgggtcacaatcaacaacgcacttgtcaccaagctcaacatcaaaactgcattcaagagcgcgactgcagagcgtttaatctgtatttttcgtgtcatgttgcgcctccaaaaaacattcatgttgataggctgtcccatcgcttaagcgcgcttcgagttctaaaaaaggttcatgatacaccatttttaaccgcgagaccccatcaaacagaggcatataaccattcttcgtactcgaaaccaccagttccttcttagttttcgttaaggtatagcgtcgtttcgaatctttagcgacggttaattgctgttcataattcgcctgttcaattgaaataaattgagcgtcatccagaaaacgatcaagttcaatcatactaatgtgccaattaatattctgacgttccatctgggttaattgcgttgtgtgcgttagtgttttagtggttgccaatattaattgactgctcaatatcagaataacgagagctacaaccatttcaatcagtgtaaatccagagcgtttagtaacaataccattgaagtgcaactcgctcacccgctttatttgtgacataaatggcctgttttttggtgacgacttggtatgtttcccgttgcaactgccattgtgcttgtggcggctgctcatttgccaatcgattggcagccattgccattacagcatattctgtagcagcacaccgccgttgaacttgatgtgctttaaactgccgtagactcattgtcaaggtcaagcctcccatcaggagaagacttaacgccacgatttgttctattaatagaaatgccggtctacttcttaacatgtaacatcccccacatcatctggacccgatattcataacggtgcccatcaattttagaccgacaaatcaatgaccgcggtctagcagctgagtcatgattaaattgaatcctaaaccatgtttctggatcgacgcacatcaatgtttctggaatcgggatatccatactttggtattgtggatccgcacttgtgtaatgcaacgtgtggttggtttgatcccaagataagtgcacattatgcggctcaacagcgacatattcgcgagtcgcatgccaagacgcttcaaattgttcaaaaaataaacgctccgcctgccgtgcacgataatctcgaatatgttgcaacgcaaataaactgactactccaacaatgaacaaaacaagacagctctcgattaaagtgaacgccttattttgtattttgaacaactttattatccttaattgttatgccgcgtttttcagcttgtttaacctgattattggttaaatatttttcacctgatgctaaatcggctagactcgacaccgttttaccgtcatcctcagctaattcaacttgtgtttgaatcgttgccactagagccgtatccgttttttgctcagctgtctctttctgatgcattaaattaggtgcaattaacaagactaacattgctatcacagctagcacaacgaccatttcgatcaatgtaaatgcatttcttttcttcttcatgaaattccctccattgtatgatatagcggtaataaaatactgagataggtacaaataatgatgatcccaattaggataaacaagagcggttgtagccaattcaccttctgtttcaattgccgttgcagttcatcgtatttaatgactgcaagcagatcaacctccttggccatctgttgtaacggacttcccttagcgagcactaattgcagctcaggtggataaaaaacgccatccgctaagttcgctaatagcgtgccccccttttggacagccgtttcaagttgttgcattaattgtacaagccacgatgttttcgccaaacgatgtgtaagctgatgcatttcggccaagtttaagccgttattcaggcaagtcgctaaatcaaataataagcaatactgatagtaagcctgcaacgttttaccgatgaacggccatctaaatgccgccgccaatcgttgtaatagcggtcgccgatgccaacggaataaatacacactaatcagaccaccagccataataacgaatgtccccatcactctaaaaaatagttgtaatggtgatgtcgccgaagttgttgggttaaactgcgcgatttccggaaaaagataaatctgcatcatcccaatcaacgccccgagaaaaaggagtagaaaacagggataggcaattacgccaactaactctctacgccgtttctgttgaattcgctgtaattggccaagatgtaacaaacactcgcctaagtttccctgcaactcagtcaattcaatctgtgcaacaaggtgtgttggaaacgaaaccgccgctaagcttggtgctagtcgttttcctgcttctaacccagtttgcacctgatgcagccactgcttttgtgtcggaaaaacaatcggcatgaactcaagcgcttgttgtaaagaaaaaccattttgcagtaagcgccctaacagcaacataaattcagtattgaattgaacagtggttttagtcttcatgaacagcctcctccaattgttgtgcagttgctaactcatagtgggccgctacattgtggccttcgaccactagtgattgataggcaacacccgctaaacaagcggttaattgtgagtggctaattccaagatctaatagacggtccatcacccccgttgtacttcgcgcgtgaatcgtacttagtaccaagtgaccgctcaacgccgcagaaaccgcgtgttgggccgtctgtaagtcgcgaatctcaccaataattaaggtatcaggccgtaatcgcaaactgattttcaacaatgctgcataggttaaccctgcggcttcattcacctgtaactgtaagaaagctggctgttgaatctctatcggatcttcaatcgcaaccaccatcttatcttgcatgacttgttccgcaagatagtacaaacttgttgtcttccctgaaccagttggaccggcaaatagcaataatcctggttgctgaattaactgcattaaacgacttaaaatctgcgagtcgtcgcaatgataagtctgcccaatgggataaatgaaacgaacaactaaactttcccgattcaaaaaatcccccacggttgccaaccgtaaataaatcaattcgcctgccacctcgatcgctgaacggccggtctgtggacgccgagtttcactgatatccatccccccttgatacttcatttgattgagccattgattgccttctgacagagtaactttttgtaacggctttagtcctgtcgctaagcgttcaataattgcccaacccgtcgatagtggtcgaaaataaagatcctgcgctttttccgttgcgcacttttgcaaaagggttgttaatacttcggtcatctcgtccctccttcctgactaaccaaagatacgcaaataaccggataattttctgcacaaaaaaagtgcgttgcaattacttgcaacgcacttatcaaacaaattagtcttcttctggtaattcgccagctgtataaacttcttgaacatcatcgttgtcttccaaagcatcaattaaacgttggaattgttctgctttttcaggatcaaccggtgttgtattttgtggaatcattgttaattcagcatttgccaatgtgtatttcttttcaagaatatcacggacatttgctaattccttaggatctgtgtaaatttcaaacacgtcttcttcagtttgtaaatcatccgcgccagcttctagaatgtcttcaaacatttgatcttcatcaacatctaagccttcacgtgcaatcgcaatgtaaccacgacgatcaaacatgtaagcaactgagccagaagcacccattgtcccgccattacgagtaaatgcaacacgaacgtctgaacttgtccggttcttattgtcagttaaagcgtgtactaaaacggcaacaccacctggtgcatagccttcataagtaatttcatcgtagttcgcgccatcgctaccgtcagctttatcaattgcccgtttgatattatctttaggcatgttagctgaacgtgctttatccataattaaacgtaatgcggcgttagaacttgggtcaggaccgccacttctcgcagccatgaaaagctcacgggatagtttttggaaaatcttgccgcgttttgcatcttgtgcgtttttacgaccctgaatattatgccattttgaatgtcctgacatatctaactcctcttttcgattatagaattctggtactaagtcgttttctatgatagcaaattaccatgctaaaagcaatgatagtcgggctatcgtctctttttttgtgtaaaaatccactgtagtgcgcaaacaatcacaatccccgttaatgcgccaacactgtccaacatcacatcttgaaaaagtggcgtccgatcaccagtcaacatttggtgaaattcgtccgtggccgcatacccggttgctgccagccaactaaagataactgctaaaaaaccaccggttacgcgtggccgtagccctaaataactaaaagccgccaataagaaatacgtcccaaaatgggcgccttttcgcacgaaaaactccacaaatttgaaatacccagatgcttttacactctgttcactgcctgcataatggaacgaaaattgacttaaccaagccttaagtggttcattcttgagaaatcgttccaaagtgggcaccgatgtttgttcatgatacgtcattgaagaactgtaaaataagatcgccatcatcaccagtgcagccactaagaaccaatcacttttacgtttaaacattgctgacctccgaaaaactagtatttctctattataccaaagcacacggttgtgacgagcactattattcgttatactactctgaagaaagagggaaattctatgtctgatcaagatcgcttttaccaaccacaaaacgctaaagatgcaatgcgttttgttcaaaaacttttcaatcaatataaccaagcgccactcacagaagaactaattgcctatcatcaaaaattattggcttatctcactaacgatgttacaaccgaagtccaaaaacaagcaaattctgaacaagccgaaaaactgactggaatgattgaagccatgcaagattggttgaagattcgcctcagtggccaaccatatgccgggaaaatgcaacacttcaagttcgttcctgatagccaacaagcccacttcaaaacccgcacgattaaaggtggcaaaaaagcaaataacctcagaacatctgcccgtcactaattcgccttgctattttagctaaaagtgctaaaatatttttgtaagcgtttgggcccgtagctcagttgggagagcgcctgcttcgcatgtaggaggtcgccagttcgaatctggtcgggtccatcaatattaaataaaaccaccctattatttatcagggtggttttttcgttcaattatttaattaatcgtatttaaaacgtctgtcagcgcttcacgggttaaaggattaggaaaactgtcctgcttcatttctaataataaccatgtacctaactgtagaaattgttcttcaggcattgcgtattgtaattttaataatcgttgggcggcccctctagtatcgttggcagcaattaaacttgccaattccctttgaaaaggcaattttttagcattttcttgtggaaagacaacctccgactgtgaattaccactttgtttcgataacaaataacccattccttccgcaaaagaatcaacttgtcgcatcaaccagtcttttttattgtccattttcatcccccccaattatgattattttaacaaattattatttgaagaacagtatttaaggtcacgaataattctctaattcgctagcctcaacattattcattttcaaagtgcacaacttaatcgttgccaacttctgcatctagcgctatattattggtaacccattcacaattcgaaggagatttttaatcatgacagataaagtctttacaaaagaaacactcgctcaatataacggtcaagatggtcaacccgcatacgttgccgttgatggcgtcgtttatgacctttccgcaatcgccccttggcaaggcggcaaacattttaaaggtttaacagccggacgtgatttaagcgaatttttcgccaagtcacatcacacaccagccactttaaaacaagccgttcaagtcggcacttaccaagcttaataacaaaaaaatctgccatcaacaaaattgttgatggcagattttttaataattcaatatttctagaaacatcctagctgctgaaacgccctagaataatagtgtaattaataaaatcgcgaggactacctgtacggtcactaatccgccggcatatgctaataaacgtttaccttggctgaagagtgcctttaagttcaagcgtaacccaatggctgctaacgccgttgtttcacaccatgtactcaagaaatggcacagtgtaccaaattggcttggaaaaacccgtaagctatttaagacgcagaataataggaagccaatcacgtaccatggcactaagctactcttcttcgctaataattgttcgctcagttttgtatcactgactttactttgtttcttttgatgtaagtaaccaaaaccgctgacaacaaaaaccaaacagatgatccgtaaaattttgaataaggtcgctgtgacaaccgttccttggttaatcatcgtcgcactggcaaccacttgaccaactgactgcactgttccaccaattaacacgccacggagttcattattatgtccccacatcaacgttccaataactggcaagagtaacatcaagatggtccccattagatttaccaatgtaatcgcaatgccggtatcttcgttatcggcatcgatgacgggcgcaattgccccaatcgcactcgagccacaaacggcattcccaccggccatcaataaataggtaccttcgctaaattgcaaccggcggccaaaccagatggcaaacccaatcgtacaactcatttgtaacacggtaaacagcacaccatgccagccgatttgttgaatactttggaatgtaattgtcgcacccagtaacatgactgaatattccaataattttttctcggaaaacttagttccggctgctaataccggttgttgcaaccaagtattgccaagtacgatgccgacaaaaagcgcaatcgttgcgccgcctaacattggtaaccataatttagcgatgtaataactggcaatcgcaatcgctaacgataacgcaaagccaggtattttttttgttatattgtccattgctttactccttctcacttgttatcttaaactataccgaaactctttcaattaataaaataaatctttataatagttgttattaagataacgaatagaagtgatgatatgtttaaaattttaacaacttttaaaaccgtttatgaaaccaagaattttacaacggctgcgcaactgctttttctatcgcagccgaccgtttctgtgcaaattaaacaattggaagatgcgctgggggtcacactatttgaacgcaatgggcgccagcagatgacgccgactaagagtgctgatctcttctaccaacaagcacaacaacttcttgatttatgggaccaagatttgcacgcactccatcatcaagatggccagccaaaaacaccgtgccgaattggcgcctcgcacaccactgcaacctacttattgccaaccctgcttaaagcgcatcggccagcccttgaaacactcgccttagatatcagtacactcaactcatcgcagattgttcaagaattgacgcagcacaaactagactttggtttcattgaaaaaccattaaccgaaaaagacttgattcggacgccactacagaccgatcaactggtcctagcaggtcgcccgaatgaaccttggttacttcgtgaacagggttctggcgtctatcactacacgatgaattacgtaaaagaaaataatttaccactcgaaaacgtgatgaccatcaaaagcaatgcgatgattatccaactattaagacagggtatcggccaatcattagtttctagcgcagccttacttgattacccagaaattccctatcgaccattgtcccaacaatatcaacgccaattctaccttgtcgcccggaagaatttaccagcaccaatccaatcatttattgcgttattaatggcgaccccactaccaatcgaataggagtgttattttggaaaactcaccacatatcaaaaaagaattaacgggctacatcatccgtgacgttttcagctcgttaggcttatccatctatattttagcggacacatattttatcgcttacgcagtcggaccaattggcttggccgctttgaatattgatctgcccatttttaacttatttaacggtttaggtctgatgctcgggattgggggcgccacgattttctcaattaacaagagcaagcatcccgaaaagagtcgctcgattttcactcaagttctttcttttgggattttattaggcctcatcatcatggcgctcggcttaatttttattcacccactactccacttactgggtgccaatcatgaaacgctcgccccaagcttgacctatttacgaattattttaattggcagtcccttatttatcatcaataacttagtcttaagtttcgtacgtaacgatagtaatccacatttgacaatgattgcgacactttcacaaagcttattcgtcattatcttcgattacctcttaatgttccccctacacatgggcatgatgggtgctgcgatggccacgatttgttcgccaatcgtcagcctactcattttgacacaacaccggcatcacccacaacggttactaactttgcagcacttaaccttacgttttaaaccgacgttcaaagcaattcaactcggtttcccatctttcttaactgaaatgagtactggggtcagcattttcgtctttaacattgttattctccatctcagtaataactatgccatcgccgcttacggcattatcgccaacatcttactagttggtctatccctattcaacggtgttgcagtcggggttcagccaatcgttagtcgcgaatttgggaaacatcattgggataatgtcaaaacgagtctcaaaatcggtttgctttccgcactcgggattgcggtaggattatatctcgttttgattggtcttaaattaccgatcatcgaaatttttaaccatgaacacaaccaacaactgattcgctacgcgtctgctggcattcccttgattttcattagttttttcttctcaagcatgaacatcgtcaataacttattcatgaccgccattgcgcaacctcgattgtcatttttcgtggccatcatgcggggctacatcgttttgattgcgagcgtcttggttctttctagccttttcggattaaccggtgtttgggtgagtgtcccattaacagaaattttaatcttcatcatgggaatgctcatcacgcggaatctcttgaaaacaatcgatcaatagtattaaaaaggtgtgtcacagctcaacttgctgcgacacacctttttttatttaaacatcaattgttgaatcagtgaaatgacggttggattatccggcaattcagtatgggctgcatggtgctggctcaccgaaattgtcatataatcagcaacttgcttttgaaaaatgagccgaccagccgcaacactcgctgctgggacaatcccatcattcttatcgttaattgtgccgccgactgaatagaccactaagtctttggataaatgttgccggcggctctttaaatcagctaacatcggtgtttcctgagtgatgtgctccgacatgccattatatggcgttcccaacgtcagtaatcgtgtaatcttcggtccacttccactacgctcagcataccgcgttaatacaagcccaccgttggaataaccaaccccaccaaaatgcgtaaagtggtattgtttagctaatttacctgctgccaatttaaaccattcggattgtttaaagacgttctcatcaccatctgcattgttttcaaacgcaaccacaatcacggggtgttgtgttttttgatcaaagcgaccactggttttcaagtgaccattttttaataccgttacttttaaaacatggcgtgtggcttgacggttcaatttagcaaaggtgccattaaacccttcaactgttccattactccccggtacgaaaataacgggctggtttgcggtggccgaagttggctgaataatcgatggcaccgttgttggaccagtcgctacatgaccgataaccccaccaatgccgaaacacaagatacaaattagtaaccattgccattttttcatttgtcatcttcctttgaatcaatcaattggtaatcgttctgtaggtagaatcgcttggatatcggctgcaatcggtgctgtaatcgagattgattgttgactgaatggatcttgaaattgcagtcgatacgcgtgcaatgcttgtcgcgttatccctaaatcaagcggcccatcatagagctgatcacccaccaatggatagcctaacgcgctgaagtgaacccgaatctgatgcgtccgcccagtatgaatctgaactttaaccgccgtcaactgacccgatgcacccaagcgccaataactcgtccaagctgactgaccatccgccaacacctcacgtcgcggttgatggtcgatttgtccaatcggttcacgaatatcccctgatgctggtaaacccgttcctgaaacaactgctaaatagaatttttgtaattgatgctgttcaatctgcggttgcaatagactttgtgcaatttggtgtttgccgactaaaacaattccacttgtatcaaaatccaagcgcgtaatgatatgcggtactaaatctgttgcaccctgcgcttgccagtaacccttaatgcgattcaacaaagtatccgtttgattagtgggacccggaatcgttgccaagccagctggtttattgaccgccaaccaatactcgttctcataacaaatagtgattggttcgtgactaacagcaactgattcatcggccggttcagctggtaactgcaatgtgaccacatcgccgcattgtacctgatcactaggcgcacttttttgcccgtttactagaatcggttggcctaacgccttaattttggcgtacaatcgttgactgatgccacttgctagcaagaattgtttaacagattgtggttgattgacgtgccatttaatttccattattcatttcccatctttgttctacttactgctattatacgatttatagcttgccaatgccaatcaatggccgaccatattgtttgctaaaagcttcaccaattcgctatgcttaaattagtaagtaaaagtggttgccttttcaggggaacgtgctatactaaagttacttactaataataagtaaaacaattggaggtttcactatgacaaaaaatatcgcagttttaattggtagtttacggaaagattcatttagcaaatcagttgctaaatcattgatgccattattcccatcagattataatctagaaattgttgaaattggtgacttaccattgtacaaccaagattatgatgatttagatcaagtaccagaagcttacacaactttcagaaataaaatgaagacaatggacgccgttttattcgtcacaccagaatacaaccgttcagtaccagccgtattgaaaaatgctttagacgttggttcacgtccttatggtgcaagcatctgggataacaaaccagctgaaatcgtcagcgtttcacctggtgcaatcagtggtttcggtgctaaccaccacttacgtcaatcacttgttttcttgaacatgccaacggttcaacaaccagaagcttatatcggcaatgtcatgaacttattagatgacaatcaagaaatcacaaacccagatacacttggtttcttccaagcaatcgttgatgctttcgatacattaatcaaacgctattaatcgaattacataaaaaacgccccgactttcgtcgcggcgttttttattttgtattagtttaccaattcgttgcattccagattcgcccatcaagttcaccttggcgttgttcaatccgtaatgctagttcatcactcgtttgttgaagcgccgtataaaaagcttgctcttcatacgttgtggcttgttctttttgtagttgaatttgttctgttaaccaatccattagccttccccctcttcttcgcgaatcagttggacttgccaattcaaatcggttaattccgatcgtttgtcggcgaattgttcgcttaaaagcattaaacgttgttgcgcttcaggcgatgtggcttcagcagcctttttagtcagcatcgcttcaaaccacgctaattgctgatcaaaattgaactcggattgcgtcaaataccgttgataatcgatgaccaagcattgtttatcagtttcttgccaataacccaattgatgaatcgcaagtggtggtaaataggtcatccctagcttacgagccaccaattcatatgggcgcaaaatttcagacagcgttgcttgttcactgccgccagcttgaaaatgtttagccgccgtaccagttgaaacgacaaccccgagtgttttcccggctaatggttggcggccattaaaggcaaattgccccgttaaaacggtgtccaaccacatttttaagctcgctggagcagcataccaatagagcggaaattgaaaaataatccgctcatggttgcgtaataatgcttgttcagcagccacatctaacgtctcaagcgcatctaagtggtgccaagtgatggcttccagtggtgctgcactcgcttttaaaaagttttggaccatcgacgtctcaatttcgggatggctgataatcaccaatgttttcatactctgccaactttctatttctaaagtttaattgtacaaaaacatggcgtaaattgcgactaatagagttccaaatattgttcgcgttcccattcggaaacttgttgacgataagctgcccattccaatgatttagaatccatgaagctctggtagagataaggccccattgaatctttgataatctcatccttggctagttccttcaatgcattgtgcaatgtggatggtaggtcagtgatgtgattttccttccgttctgtttcgtccatgctatagatgttgcgatccacaccagcatcaggcaagagcccttgatctaagccagataaaccggctgccaaaatcgacccgattgctaaataaggattggcacttggatcaacactccgtagttcgagacgcgttgataacccgcgtgattgtgggacccgaatcaatggtgaccggttatgaccagaccatgcaacataaaccggtgcctcaaaaccagggactaatcgtttgtaagagttaactgttgggttgttgattgccgtgatggcgcgtgcgtgttgcaataagccagctaagaaatgataagccgtttttgaaagttgttctgtacctttttcatcgtagaaggcattcgtaccatcttgattaaagagtgacatattaatgtgcatcccagagccgttgacaccgtgtaatggttttggcatgaaggttgcatgtaatccatgtttccgagcgattgttttaacgactaatttaaaggtttggatgttatccgctgcatcgactgcatcagcgtatttaaaatcgatttcgtgttgtccgggtgcgacttcgtgatgactggcttcaacttcaaagcccatcttttcaagttccaaaacaatatcacgccgacagttttcgcctaaatcaacgggggcaaaatcaaagtagccgccttggtcgttgagtttcaacgttggtttgccgtattcatctaatttaaagaggaaaaattctggttccggtccaatgttaaagtctttgaaccctttatcttgcatttcgcgcactagtttcttcaaattattccgtggatcgcctaagaatggttctccatctgcggtatagacagaacagattaaccgcgcgacttttccatgttccgcttcccatgggaaaatgagccatgtacttaaatcaggccgcaaatacatatcactttcttcaatccggacaaaaccgtcgattgaagaaccgtcaaacatcattttgttacttaaaactttatctaattgactaattggtacttccacattcttgataatcccgttgatatccgtaaacattaaacgtaagaacttaacgttttcttgatccactaattgcttgattgcttctgctgtcaatactttacgtgccattaatccgtcgccccttaatataatttagatgattgtgaaatggttgactgttgtccaactaagccgccgaccgataataattcattggccaataaccgccgcgctttttcgtctgataattgtttatcacgctgccgatccgccttcttctgataaatctggcgaatctgtgccatcgtggtgccttcagctaggtaatccttgatttccaacaaacgatcaacatcgttcaacgaaaacaaccgttgatggcccgttgtccgttcaggaaaaacaagcgcctgtgcttcataataacgaatttgacgcgcagtttgtcccgtcaatttcattaccgtaccaattggtaaaactgctaagttgcgccttaagtgtttttcagccatccatttcacctcacttgcgttttatcttaccagtcgcctttcaaacggtcaacatttgatgttagattttctaacatcagccaacaaaaaaaggtaaaccaatttggtttaccttttagacattagtcttcatcgatgatttgaatcaaaccacctgcaagcataaacaaatgcgttaccaccggtccaacaaatttaaactggcgcttctttaactctttcgcaagttgcgtactgatcggcgctgatttatcggacacgccagccatttgtgaatcaagcaattgcggctgaccatcaacaaacgcccacaaatacgctgaaaaactgccatattcagtttggatggcttgaattgcccgcgcattttgaatcgttgcccgaatcttacgcgtattacgaatcatatctggttctttttgcaggcgttcaacatccatttcatcaaattgtgcgacttgatcaatcaccatccctaccatttgttgtcgcagaactggtattttacttgcagctactttccagctcaaccccacttggaagaccccaactgttaagagttcaaaccaaatacgatcatcgtgcgttggcgtgccaaaataattgtgataagcctgaaccccatctgtcgccgtttcaaagttgttttttgctgtttcatctaccatcgataaaccgcctgtcctgcgctttctgctggaaccccaactttttccgctaattcgctgtaatgtacctctaaataattaaagcagtcagttgtgtcatgcgtcataaaataaggcagcaaagccatctgatcatcaaattgaacatgttcctgttgtgcataagctttcagaacttttgccaactgaagaaaatcctggttggtaatatagtatggtgctacggattgctttgtatcaaccgtcacgatggcccgataagcgtgcccgataccttgtaacccgccaatggttgatggtccagcagtctgcatgaccgcataatgaattgttcgaatttccgttgtcgcaagttgcttaacaacttttgcgggcatgacttttaaaacatctgtctgctttaaacaaatttggcgcggttctaatacaattaaataaggactccgtgcttgccgccaattcgctggcattgtttggccatcactagtaacagttacatccgtcaaagtggcactgaactgttgtgctaaatccacatagtgttgttcgggttgttgcataatccgtcctaaatcggacagcggttttgtattttcactttctgccaaatgccaatgttgccgcaaccgcccaaagaatgaattcggtttagtgaccgtttcaaccccgagcaaagtattcaaacttacattatacaatttggcaagaacaaccaatgtattcaagtctggtgcacttttatccgtctcccatttagaaatgacttgtcgtgacacattaatctgctctgcgagtgtctgttgagagtagcccgcatccaaacgaaattgttttaattgttgaccaattaacatctaaccacctccaagacttaccgtagcgagaatgacacatttatactagcaacaatccaaagcatctcttaaaaccgaccgctacgattcgttgcacccttatcataccatgcttaacgcacaaaaaaagcggtcaatcaaacgcgaatttgattgaccgcttggcatttatttttcaaagaaggttgtttggactgcccgactaatcgcgagtttaacgtgcgcgtaagttaacccaccttgtaagtaaagtgtatatggggcgcgcaatgggccgtctgctgaaaattcgatgctggcaccttggataaaggtcccggcagccattacgatttgatcttcgtaaccggcaaaatcacttggaatgggggtcacaaatgaatcgattggtgattgcgcttgaacacaaccagcgaacttaaccatatcatccggattaccgaagttcaccgtttgaatcaagtctgttctaggggcatcccatttaggtgagacactcaagcccatttgttccaaaagcgctgcttcaaaaacagcccctttaatcgcattaccagtcacacttggtgctaagaagaaaccttcaaacatcaattgcagattgccttgtgtggcgccttcactggcaccaacacctggcacagtcaggcgataaccaatcatttcgattaatttttcagtcccgacgatgtaaccacccgtttgcgcaatcccaccaccagcatttttgattaaagaaccggccattacgtcggccccgaattctgttggttccgttgtttcagagaattcaccgtaagcattatcgacaaagacaatcaattcagggttaatgtttttgacaaaggcaatcatttccttgattttatcaaccgtgaaactatcgcgatcagcatagccacgtgaacgttggatagcgaccacttttgtcttagctgtaattttggtccgggccgtttcaaaatccacggcaccatcagctaataatggcacaaaatcgaatccaatttggaattcttttagtgaaccaatcccgttaccggccatcccgatgacttcttgcaacgtatcatatggttcgcccgtaagatataaaagatcatcgccaggccgcaacatccccaataaggccgttccaatcgcgtgtgtgccggaaaccaattgcggccgcacaagcgcatcttcagttttgaaaacgtgactatagacggcctctaacttatcgcgtccttgatcatcgttgccgtaaccggttgtcccgtttaaatgcgattcagaaatattttctgcttgaaacgcttcgagcacctttgcttgattattgatgatttgttcatccagtgcttgtaaacgcggtgcgatttgcgtatcaactgctgcgattttagcttgtaattctggtgctaagtttgcttgccaatccattttttaaccactccatttctattattgctgtaaccattgttgtaaatcggtttgaatccgagccaaatcggcttcaggttgttcaaccagattataccaattgaccggaatctggtttctaaaccacgttagttgtcgttttgcgtagtgccgtgaattttgttttacttgagcaattgccacgtctaatgaacagtcactatcaaagtatgggaagaactctttatacccaatcccccgcacggcttgcggactcgtttcacgatgtgcataagccaaccgtgcttcttctaaaagtccagcatcgatcatttgatccacccgccggttgattcgctcgtataataatgcacggtcacaattcaatccaataataaacgtatcataacgtaattcttttggcttttgttgtgaaaacaaagttcccgttgtttcataaacctctaatgcgcgaaccacacgccgtggattcgcactcggaattttagcggctgcttgcggatcaatttgattaagcatctgccacaaagcttcttcagaatgctgatccaaaaaagtttgccatttttgacgaatcgtaaaattctgttccgcatcttgcgcactacccagggtcatatcgtacagtaacgcctgcaaataaagtcccgttccaccaacaaccaagggcatgtgttgccggccgacgatttcagtgacgagttgttgtccttgctgttgaaagtcaaaggcagtgaagcgttgatcgatatccgccacatcaattaagtggtgcggcgcaagcgcctgctcttttggtgtgactttggccgtaccgatgtctaactggcgataaacctgcatcgcatccccggaaataatctcaccttgcaactgttgtgcgagttgtagacttaacgctgttttaccaacgcctgtcggaccaacaatgacgattagcttttctttttccatattttcaccacattaattaacgtattttactagctattcgcgcttaaatacgcgataataaagttgtacttgaatgaattgagacttgaggaggctttacctatgaaacataaatttctaaaaggtttcgtaatcggaaccgtttcaacagtcggcgcgattgccggttcactcttggcatttaagaagaccgtcgttgatccaatcgaagaaaaagaaaatcaaattgaagaaagtcgtcgacgtgctaaccgtaagagccattcagctcaccaaggctaagcgctttgaaaagactgcgtccgttgcctgattggcgacggactttttttgtggaaacgtgctttttaaagctgactcttgggattagcttcgtattgcaaacgaccgactttgtcggtcattaacaacactatgctaatgctcagagtcaaaccgctttaaacgcactctgttttgaaacgtgcgccgccagatatactctttcggttagttacataccgcaaacgatcggctctgccgctcatttacggtatgccactaatcctcagagtatgaccatctgcctgcgcactctataaaaagcccaacagttgactagtttttttcgctagtaactcttgggcttttttggtttaatttaatttctttttacgctttgttttgccggtccaaccagcataaccctttttcaaccatttaatgtcggtgaaaccagcttttcttaacttcagtgctgctcggatactgagcgtaatgcctgcatcatataagtagactggtaagtccatccgtagttcacccatattttgtttcaacattggataaggtaagttgcgggcgcctaaaatgtggcctgcatcaaaatcttttttatcccgtaagtcgacaatttgggccttgcgcattgtttcttcaaacgccgcttccgttaattcgccgcctaagcgtttgcgttgaatttgataatatgcccaatcgcccaagaaccaaagtaaaatggcgatcagaataatattaattactacccatacattaattgtccctaatacaagcatcgataagactcccttataacaaattattgttgatcaaattgaagtgcaagtgaagcagccccgataacaccggctacgtttcctaagtttgctaaacgaatcttagtcgtatttttaacatttgggaatgtaaattcttcaaagtaagcttcaacttgtttacgtaaaaattccccagcagctgaaacaccaccaccgataacgatgtaagcgggattcaacatgttcccaacgttagctaatgctaaaccaaggtagtaagaaacacgatcaacaaccttaacagccaatgcatctgattctttagccatgtcaaaaactaatttagagctgatttcttcaccatcatccaacattgtctttaattttgaattaccagcgtattcttcagccatgtcacgtgcaacgcgcacaacaccggttgctgaagcataagtttctaaacaaccttgtttgccacacgtacattcataaccatgtggttcaactgttacgtggcctaattcacctgcagaaccagcaacaccgtgtaataaatggccatcagcaacgatcccgccgccaactccagtgccaagtgtgacaaaagcaacatcgggttggttttcaccagcacccttccaacgttcacctaaagcagcaacgttggcatcattatcaattgcaagcttcatgtgtgtgccagcttcgatatcgcgacgtaagtattgggttgtcttccagtttaagttgtaagcaccaataacggtcccttctttactgttaacactaccaggtgtgcccataccaatcccgatgaaatcagcaggtgtcatgttatataaatctaaatgatgattaatcgattcaatgatatccggtgtaatgtggctaccttcatctaaaatatccgtatcgatactccagcgttgttggatttcgccatccattgtcataattgcaaatttagcagttgtcccgcctaaatcaacgccgattaacttcttgtctgtcatttaaacttctcctccaataaattgtgattaaacgcttcatttttctccaaccgatgttcacgcactaaaaccatcttagcatcacgatacactttgccatcgattaaccccgcatcataaacgtgccgtaattcgatactggtgagctcgatatcccaaagtcgtttaccaagatggacgtaaacgccaaattgttttaaaagttgttgtacatcatatagagttctcatcaacttcacctttaacattatacataaattgattaatgattcatacccagaaaaccaaataaaatcatcgttgcaacataaattaacccactcaccacacggttcagcgggtcaatcttacccactttaggtgcacccagcgccatactacttaaaaagccgccaagtaccccacctaccattgcgtacaatgcattgtgatcgacaataaattgtaatccgattgttaaaaataaaaacagccaatactggcgtgccacttgtcctagcacggattcttctttaaaggcatcacctaacatcaagaagccaccgaatagccctaagatagctgttccagcagtcacggttggtgtatcgagaccaaaaaaagcgcccgttgtaaacaaactcgccaaactgctcagtatatagatagctaataggcgccagtgtcctaataatcgttcaagttgtccaccaacaaaaaacaaaataaccaaatctacgaagagattcataaaccggccatgattgacagatgccatcataaacccaataatccggccattcattagcatgttaaccgatgtaaagccgttcaaccatacaaccggattcaaaaacatcattgcaaacatcaaaatcgttagtaacatcaaggcatacaccacaatcggtgcgtcttgccaacgttctttaaaattagtcatcttttctcctttagacctgaagaacctgatcgagttggatatcgaattcatcaatggcccaatcagcacttcgttgttgtggtttaagcgctagtgcaacagttggcattggatatttggcaagataacgatcataataaccgccaccaaaaccaacccgccaaccttctggactaaatgctagtcccggcacaatcattaaatcagggattaacacctggctaccagctgtaaccactggttctaaagcaccataggaactcgttgttaattcagtggttgccgttaacgggtaaaaagccatttgtcgctctggcaatgtcttgggcactacaacttctttaccggccaaacgaatggcatcaattaccggctgggtcgccatttcaattggctgactcaacgtgacaccgatgattgttgccttttgaaacacctcggttgccattaacaattccaaaagttgtgcttcttgggcatgtttaagcgcaggcgtctgcgcaagcgtttgtaatgccgcaatttgttgttgccgaatttgctttttagtccgcattcaaaagcctccttaataaaaaaaagcccgagcgcgaagcgccccgacttttgatgtgcgtcactattatttagtttcgcggtgtaaagttactttgcgttcgcgtgggcaatatttctttaattccaagcgatctggattgttacgtttatttttgtttgataagtaactacgttcgtgacattctgtacattccattgtaatgtgaacacgcattgatatagcctccaagctgtaagtaaatttctaaaaaactgtttaattcttagactcttagtatcataccattttttatggtatctgaaaaggttattttggaatatttcattcagtaatgttatttaatttatagaaactcgtaatcatttcacgggctagtaacgtattgtagtgccctttatcagagtttaagttcgggaacacaatggcgattgccacttgcggattatcgtatggagcaaagccaaccaaactagaagtaacggtttcgacttgcttacttgtcgaatcgtttggatcttcacgggcaaatgattgtgccgtcccggttttagcgccaagcgttggtttaatatctttcaaggtgtgtgctgtcccccaagcgttggtcccattgacaacgttgtacatcccttttttaacgacattaaagtaactttcgggcgcatcaactgtgctaagcactgtcggcgtggtcttggtaccaacttggccagctgacccatcgttaccagtttgttgaatcgaatccacaaggtatggtttcattcgttgaccaccgtttgcgatggttgaaatgtattgtgccaattgaattaaggtgtaggcatcgtagttaccataagataaatcaagtaatgaaccattggctggctcgccatattcattgacggttggcccttcgatcccggtggcttcacctggcaaatcaatcccagtcttttgtcctaagccaaattgactgaagtagccacgcatcttcgtaaagatatctgaatccatcgttaacgaagaattgggtacatatttggcatgcccttctaacatcgctaattgcatcatgtaaatattagaagaaacttccaacgctgattcagcgttcaatgatccaaacgtcccaactgggtaaacagatttcttaaccggcgttcctcttaaatagattggtgtatccggtaaggtattattggttggcgtaatcacaccatccattaagccccccataacggtcgcccctttaatagcagaccccatgacgaaggtgtgattaatcaccccgagcgcatcatcggcaatttcacctgacttacgatcgttggattcgccagccattgctaaaatagcacctgttttcggattcatcgccacggcataggcaccatcagaatactgagtggctcccgctgcttttgcctgatcatagattttcttcaaagcagcttccacttgcgtttgataagcttggtcaattgttaaatttaaattactccctttttgccctttaaataagacattacttgagagaatctgattattcgcaccaacttcaacttgtgattgcgacttagaaccatgcaagacactttcgtattgcttttctaaataactggtcccaacgcgatcattacgcgaatagccctgtgctagcaaggagttgacgccatcttctggtaacccttgctcttcagttgaaacatgcccaataatactgcgcattgaatcgccattaggataagcccgttcccaatcggtgctgacattaatccctggcaaactcgttagatgttcactgatttcagcaatttccttatcagtcacatccgtatttttaatataaactgtcgataattgataagccccactcataattttgaaaatcgcagcggcttgtttttgttgctcgtttaaccctttaaacgactttttaaccaattcgattgttgattgataaaccttcttttctggcaactcagaaccatcactggcaaccttcgcagatttaggcagttttgcgttccattttttaagattcttggggttactgaggtagtaatcaatctgatcacgttcagttaacttatccgtcgggaccgttaaatattgggttaacttattggcctctgcatacattttgtctgccaagacattcatattcttcgtataagtaatcgccggtttagcagtattcccaactaagacacggccctttgaatccagaatcatccctcgaggcacgttacctgtaacgattttcttatcagtactgttgaccatcgcttgaaaattagcgccctccatcacttgcaggcgtcccaattgcataatcaacgcggcaaataacgcgaagacaacgaataataggaaatttaagcggaatggaatcagtgatttttcacgattttgtttgttttttctcttaatgattttcacagacggtcagatactccttatttagcgccgctctagtaaaagatggcgccgctctatgcttcaaaaagtcgccaagcgaccttttgagcgattttgtgctgtattgtttaagtttagcaaaattatcttaaacaagctatgccaaatctctaaattcaaacgagattatggtatgcttaagcatagtcattaactggttatattttacagcttttctcagttaaaaacggactagcaacctaatttttagatttttttattaattggaggattaccgtgagtcgattttacgcttttgcacgtcgtcattatacattaggccttagtttcttactaccatttggcattttatttatctacggactacttcgacaagtgttcccttttggagggcaaacaatcctgactgttgatctaggccaacaatacatcgatttttacgctttttttagaagtacgctattgcaccatcccgaaacttttttttattcctttgctaagggcttagggggcgacatgcttggggtctgggcttactatttgatgagtccattcaatctaatcgtcctattgacaccaggaacttggttgagttttggtgtttggctgcttgtccttttcaaaacaggcgccagtggtcttagttttgcgtactacttaaaatctaacaaactactccatagctggtggttaccgacacttagtgttgtctacgccttatccgggtttgcaattgccaaccagtttaacgttatgtggttggatgcactcgtctggcttccactagttgtcttaggcatcgaccggctctttacaggccgtcacttttggctttatccattgagtcttgccgcactcttaatgagtaactattatatgggctatatggtttgcctgtttgtcattacttattttgcgtgggcttgtgctcattattggcaaacttggcgccatctatggcaacgcgctgcccgcttcatcagtggctcactcttggccggtttactctcagcctggctcctattgccaacttttttccaattgacgcagagcaaagggcagtacaccattcaaaagattcattggaagttcgaatataatccgcttaagatgctttctaaacttgtgattggcaattttaacttcgaccaaatgccaaaaggcgaaccgaatatattcgtcggcagtctcgtattgatttgtgccatcttgtattttggaacacgcaagattgcctggcaagaacggttagttgccttattagtcaccattttcttaggtgtttcaatgtgttatgaaccccttgatttattatggcacggcatgcaatttccagtttggtatccttaccgcttttcatatgtggttagcttttggctaatcgtgctcgcggttcaacggctccaccagcacccccgatttagttggtatcaactcttgttgccgtttttaatgttgatggcggcttttggttatactgccaaacatctcaagagcttcaccgcgctaagtcctaatcagattaacttaagcatcgctttcttactgatgacatgcttgcttttactcctgaaaaagccgctcaagcgctattatcctttgctcttagttctatgcgtcggtggtgagatggtcaccaacgcgacaatgagtcttaatcaaattagctatgtctcacaaaaagattacgcagattatacagctcatttacaatcagccattagcgcaattccaaataaaaccgcgtttcaacgaattggcaaaacctttatgcggacaaaaaatgacccgatgcaagctgattatttcggcggatctcattttaattcgatgctcgaactgagctatccgaaattcatgggcagcattggcgaaccagctggcgatggcgccgttgccgatactaatcagaccctgttcaccgatgcgttattaggttatcgctactaccttaacaatactagtgggcaagcaacaattccactcagtacgaataagccggacttagcacgttataacttactcaaaaaaaaagatcaaattgcaatttatcaaaaccccaacgcacttgatttaggctttgcggcctctgaaaaagtgcttaaacatcatgtggttgccaattatcccatccttgaacagaaccagattgcggcagacttagtcaattcagcgacagaacagccactcttcacacttcaatttttcaatactgtcacttacaagaatgctaaacaaaaaccaaaactcaacgaaactttcctccgggttgatccgaagaatccagctcacgtcatctataccttcacacccacaacgagtgacccctattacctcacattaggctcaaacctcgaaaaaaatgcggttcaggtctcattaaacggtcacacgctacaacaatacgatactttccgcgatactgtcgtcttaaacctgacaagtaacgcaatcggccaacaacaaaccgttgaccttagcttctctaaaaaggaaatttggctccaaaatattaatttatatagtttgaattatcaagcattgacgcacctaacgcagcaacttcgtgcacatgcattgaaactgaatactttctcaaacacaaccatcaaaggaacgatcaccattcctcaacaaaaccaagtcctcatgacaaccgtcccctatgctgctggttggcatgcaacggttgacggccatccggttaaaatcaaacgcggcttgaagaacttcatcgccatcccgctgaaaaaaggtcaccataccgttacccttaaatactggccaccttatttctattggggtttgacgatttcactaatcagcgccggctttgcaattggtggttattgcagctacaaatactaccgccgccgccacttattctaaccatcaaaaaaagccccacgcactcaatttaaaatgagtgcgtggggcttttttgaatctattcagtatccgttcgtgctaaaatcagtgcattttcggaatagttaatgtttttgcgtaattcatctgcaagttgccatgaaattttatgttgttccaataactcttgaatcgccactcgttcactcgtgagcgctttgattcttaatttttgtaattgacgttcatagatagcggtcttactccgccccccatttttcatgttttcaatctgattccgataccgcacaataatttgataaataacctgacgattataatgacgttggcgattttcaggctgttttaggaaatacgacaattgtttaattcccgccttagccatttcacgttcagtcaattgccactcggtttcacttggtgatttggtatgccgcggccagagatgcgtcaaaaagcgtttgctgattgaccaagcacgatagacttgtagttgcacatgatgccaattaaaactcgtcccaataaccgataacattacttgtttttgccgtaacttacgtttaccgtgccgatagcttttagcactaatggccttttcagcccataacaactctaacttctgacgttctccgtcaaatgccacttgtcgcaaaatcaactcttcagcaattaacggtggtagttcgtcacttgtgcttgcttcgctttgttgactctccaaccggcggatcatcaactgatactctgccaataaatctaaagcagcccggttattatcaatatgccgttgggattcgaccatgctcgctgctactttgtacatgtaaatcttagcgtttgtttcatccaataaatcagcagctgcttcatcttctgcggctgcttcggcttcaagatctcgttgcatccctcgcatctcgattggtgctttgacttttgtcagcttaggaattaagacaacggccatcaccagactgacaataatcacgccggccgcaataaagagcattaagccgcgttgaggaaacggtgaaccatccgctaaaacagttggcaccgataataccccggccatcgtaatcgctccacgaaccccagaaagtccagagagcaccgcaattttaatgttttcgcggaatgttttgggattcgtctggttggtgtagagcaagtaagctagtgtccagagtccccgcacaatcaccagaatcaaccaaaccgctaagacgaggagaatttcttcactcgtattaatcagcggattatgcacggtattatgcatagcgacaggtaattcaatccctaaaattaaaaagacaatcccgtttaataagtaaacactgattgaccaagtttgttcggtcactaacttcaactccggtaaaaaatcgaggaagatattccgtgatgaatgactgatgatcccagctaccaccaccgcaatcacaccggatgcgtggaatagatcttcaacaattagatagatgataaacggtgtcaccaactgtaaaatcgtatggaacatcacatcttcaaagccttgttgtagcataaataggcgaataaaatgaatgattaacatgataatcatccccgctagtgtgccaacaatactaatatacagaaaatcgcccgcggcttgttgccatgagaaatagccggtaacagcggcagcaatcccatatttaaagctaatcaagccactggcatcgttaattaaactttcaccactcactaagtgcaaaacccggggcggtaaatcggcctgttctgaaatcgattgtaccgccaccggatccgttggcgacaagattgccgctaacgcaaaacttgcagccagcggtaacgccgggactaaccaatgaatggccaagccgccaattaacgtcgttgcaaagacgaggaaaatcgcattcccaataattggtccgcgcaacgcccatagttccttcttaggaaaacgacggccatcgttaaacaataatggtgcaacaaacaccaacatgaaccaatctgtttttagtggaatcttgacggcaaagactaacgccaccattaatcccaacccgatctcaattaaactaaccggtaaatttggcaaataatgcccgatgatattggcaataatcaccaacgtaattaacaaaataacagcttcaataattgccatcccaacaccctttctttttaaaacgctcatcctgataaaaaagccctgataaaatcatcttttaccatagcttttcatcattgatttaaccttgcttatgttgcccaataatccggacttctggttctaagcgcacattaaacttcgcccagatcgttttttgaatgtattcgatcaacgtcaaataatccgttgccgttgcgtgatcaatattcacgatgaacccggcatgttttttagaaacttgtgcgcccccaatttgatgcccttgcaagcccgctttttgaatcaacggtccgacaaaatgaccgactggtcgtttaaagacactcccacatgagggatattctagcggctgtttggcagcccgcaaagcgttgacctcatccatccgggcgcgaattgttggtgccgcacccgttgccatttcaaaataggcaaccaacacaatactgccgttatcttgaattaaactatgccggtaactgaagtctaagtcagcggccgttaacgtctgtacttgattatcgcgcattaaaacatcaacgcgggtcagtacatcactaatttcgccaccatatgcgccggcgttcataaagaccgcaccgccaacactaccaggaatgccggcagcaaattctaagccggtcaaactaccgctataagctgcttcagaggtttgaataatccctgctccagcttgcgcggtcaccaagttaccttcaactttaatctgattcatcgccgttaagatgatgactaagcctttaatgccaccgtcacgaacaattagattactagcattaccgataattgtgatgggtaatgtcagttcattggcactggccactaattgccgcacttctgcaacagatttggggagtgcgagtaaatctgccggtccacctgttttggtaaaggtgtataagctcaatggttctgcttgatgaatctcgattgcttggtttgcttgtaaaaatacttcaacttgacttgtcacaattgtcgttcccctcaaaaaataatctactcctagtttaacaaagacggcttgaattgaacagccaacactttttttgcgtattattgactagaccgttaaaatggaatttagaaatgaggaatcgacaatgaaatttatttcttggaacgttaatggcttacgcgccgttttaaaaaaagactttatgatcacttttaatcaactagatgccgattttttctgtctgcaagaaactaagatgcaagccggccaagttgaattagatttaccaggttatcatcaatactttaattacgctgaaaaaaagggctattccggtactgccatcttcactaagcataaaccgctcactgcaacttatggtatcggccaacctgaacacgatcaagaaggacgcgtgattacacttgaataccctactttttatttaatcacttgctacacacccaattcacaggataagttgaaacgattagactatcgcatgcgttgggagaatacctttcaaacttatatcgctaatttatcgactcaaaaacccgtcattttctgcggtgatttaaacgttgcccatgaaccaattgatctgaaaaatgataagaccaatcatcataacgccggcttttcagatgaagaacgagggcaaatgacaaccctcttaaatcgcggcttcaccgataccttccgttatttctatcctgatcaacccgatatttattcttggtggagttatcgattccacgcccgcgacaataatgccggctggcgcattgattatttcattacttccaatgatctccaacctaaattagtcgatgccaagattcacacggaaatttttggttccgaccactgccccgtcgaacttgacacgcaagatttattcgcttagaataagcaaactttataaaaagcgaggttcaaaataatgaattttgtcgcaatggattttgaaaccgccaacggtcaatggcatagtgcttgctcacttgcccttgttgttgtgcgcaacgatcaaatcgttgatagtttttatacgttaattaaacctgaaacttattttagcagtcgcaatacgcaaattcatggcattcatgaagccgatgtggctcaagcgcccaagttcaatcaagtctggccgcacatcgcaccatttttcacgccaaacaagttagtggtcgcccacaatgcgaattttgatattggtgtgttgaaaagtacactccaacactacgacattccagaaccccattatttagcgttggatactctcaagacgagtcggcggttgtatccgcaatttgagaatcataagttaaacaccttgtgtgataacctagcgattccactcgacaatcaccacaatgcactggctgatagtatcgcttgtgccaagattctgattaaagaagccaacgattttggcgttgaaccgctaaaagcggccaccaaattaatcggctaacaaaaaaagagcggttaacttgtctatgcagacaggctaaccgctcttttagcgaatggtggattaaagctaaattgtcattagggcttcgacaagattaacaacttcatcataatcattaatttgttttgactaatgtacgagctttgtttcgctgttaattataccacaattcggttcatcgtgttaacttattttgacttagattgaccaaaactcaagataaacaccgtactgatcacgagaatcccacccacgacttcccaggtgttgaaactcgttttcaagaataaaacagtaccgatagtcgcagctaatggttcaaaggtattcaataaaccagccgttgtcggtgtgatataccgtaaactccccaagaaacaaaaattggcgagcgcggtcccaaacaaagcaatgaataagacactgctgattgttgccacattcaacggtggaacaccgacccaaaatggatgaacaaatgtgaagaccaccccaccgattaacatcgcccagcccacaatcactaatgttggatatttttggaataacttaaccggaattaatgtgtttaaagcgccagaaaagccaaggcataaactaagtccgaatgccgcgtgtgaaatcgccaaatgtgtcagttgtccttttgtcactaacaaccacgtccccaacaatgcaacagtcactgcaattagttcaacgcggctaggtgctctacgataaatcaccaagctaattaagatgatcatgatggtgcctagctgttgtaaaatcgtagtcgttggtgcattgctggcttgaatcgttagaaaataaaaatactgaacggccgataaccctaatactgcaaataataacatccgcgtaaagtcccgcggttgccgccacactgtaaaaacatcgttcggttgtttaatgagcgcataacctaatagaaataggcctgaaagccccatcttaacccccattagccattctggcttaattgccgtgtcagtgaatagccactgtgatactggcccttgaatcccccaaaatattgatcctaatacggctaagtaaattccgcgtcctcgttgttgttgcatcttaaatctcctcatccatattcattaattggcacatttgcacaaccggaatatagcccgtttctggcgcataaaatccggctgctaattgtgcttcggtcacaaaaccaaaccgtttgtaaagtgcaattgcacggtgattacgggcttgtactgttaactcaagccgtcgcggatttcctatttctcgaaccgacgctaaaaggtgcgccatcaaatcagagccaattccgcgatgccacttcgcttttaaaacagcgatactaacttcactgatatgtgttatcccctgttctgtcggactattcacacgaattgccccgacaatttgctgttgatcaaaagcaagcaataatacatcttgttgcgattcaagaatacttgctatcaaaaattcagtaaataatggtgttaaagtggctaactccgctggtaacgcaacataccgtgtttctttagcgaccgcctttaaaaagcataaataagcccgcgcatctgctgcttgcgcgggccgaatgtcaactacactagtctgcaaaactagtacgcaccaatgcttcgtagtgagcgccgtgcggatcaagtactaacgtccgaacttgatcatcgctaacatccttattaaaatgaatcgtcaaataatcgctcggtagttcttcagcaataaattgactccattcaaccaccgaaaccccgtccccatcgaaatactcttctaagcctaaatcactggcgcccgtttcttccaatcgatacacatccatatgatagagtggtaaccgaccgtcttgatactcacgaattaacgtaaatgtcggactcttaatatagcggtcaattcccagaccagctgccaagcctttcgtaaacgttgttttaccagcgcctaaatcaccatccaacaacaagacatcaccggcttggacttgttggcccaactgtttggcaatcgcaattgtttgttctggatcagttgttttaaattctaacatgttctgcctcattctaattgttatctgtgtgtcattataccgaaaaaagccctgttcgcaaagtcaaagacgccagcacaatttttctgtgctggcgtctttgttgtcggtcaattagttttgtaatgcttgagcagccgtaatgatggctaacttgtaaacatcttcttcgttgctcccacgtgataaatcagaaatgggttgattcaaaccttgtaaaattggtccgatggcttcgaaattcccaaaacgttgggcaatcttgtagccaatgttccctgattgtaattctgggaaaacaaacacagtggcttgacccgccacttttgaatctggtgctttttggttcgcaacaactggtacgtatgcggcatcaaattgtaggtcaccatcaatgtctaattctggcgcaatttcatgtgcaatccgtgctgcttcttgaaccttcgtgacttcgtctgctttcgcagaccccatcgttgaaaagctcaacagcgcaactttcggatcgatatcgaacaactcagccgtctttgcagattccacagcaacttcagccaattcttgcgcattcgggttaatattgatggcgcaatctgagaataagtaacgttcgttatcgcgaccgcgttgcataatgaaggccccgcttgtgcgttggacacctggttttgttttaataatttgtaatgctggtcgaacagtatcgcctgttgaatgcacggcacctgaaaccatcccgtcggctaagtttaaataaaccagcatggtgccaaaataattaggatcttgtaaaattgtttgtgcttgttcaggggttgccttgcccttgcggcgttcgacaaaagcggcaaccattttttcaaagtcagctgttggatattcttgtggatcaataatcgttatcccgtccaagttaaatcctttagcagcagcgatttgttgaatatcattcgttgccccaattaaaatgggtttcaaaatccgatcagcattcaaccgtgctgctgcaccaataattcttggttctgttccttccggaaaaacaattttaaattgccgattggtaatctttgcttttaagctttcaaataaatccacaattgcaacctccagtaagcattttattattgctaatgtaatcatacaacgtttctaataccgcgacaagtcaacaatggtaacgcttcattattctaccgtgactgtttgtggtaattgccaattaattggcgccatgccccattgctcaagggcagtattcgtctgtgagaaaggtttagagccaaagaaaccatgataggctgacaagggactgggatgtactgcagtaatgaccgcattttgcgtctcatcaattaaccgccgtttatcctttgccgcgtttccccataaaatgaagaccacatgtccccgatttgacaatgcagcaatcgccgcatccgttagctgttcccaaccttgtttacgatgcgaatttgattgacctgcccgcacggtcaatacggtgttcaacaagaacacgccttgatccgcccaactctttaaatagccatgctgaaccggttgaaagccaacatccgtctgcaattctttataaatattttgcaatgatggtgggactttgacccctggtaaaacggaaaaactacacccatgggcttggttcgggccatgataaggatcttgtcctaaaatgacgactttaacctgttcaaacggtgtccattcaaaggcttggaaaatatggtgcatctctggataaaccgtggtcgtttggtattcctgtttcaaaaaggtatggagctgaccataatagggtttggcaaactctggtgcgagaatcgtttgccactcattgtgaataattgttttcatctgctcacctcattaactagtttatcgtgttttaacataagttgctagaagaaaagtagcttgcatgctaagatagaggtaagtttctaataatacgttttcaggaggaattcctttgatttcaattattgcatctgatatggacggtaccttattaaacgacaaaatgcaggtttcagacggtaacatgaccgccattaaagctgcccaagacgccggcatcgaattcgtggtggctaccggccgcagtcgttctgaagccctccccctaattgacagtgatgacatccaacctactttaattacgatgaatggtgcccaaatttttgattctttaggtaatgaagttttgaatgtgccgattgattccgaaacggtgacagccgtcacagaaaatttacgcgaaaataatatttacttcgaactcatgacgactgccggtaattattcagatagcaaagtcagtcgcatccaaaatgtcgctgatttactcgtcaacctcaatcccgatacgagttataaaattgcggttgctttagcagcagcccgtttggaattaatgaatattaactacgtcgatgatcactatcaagggattattaacgatccaacggttaagattcttaaaatcatcgcttttagcacacagggaatgaccgaattagcaccaattaaggcattttgtgaagcccgcggggatttagttgtaacttcctcttcaagtaataacatcgaaataaaccacattgacgctcaaaaaggtatcgctttggccgcctatgctgaacaaagagggattccagttgagcaaacaatggcaattggtgataacttaaacgatttttcaatgatcaaaacagctggcattggtgtcgccatgggcaatgctgtcccaacaattaaggaacttgcgaactatcaaactgcaactaacattcaagacggcgtcgcacaagcgatttatcacgcgattgacttgaatcgtacagctgaaaagaagtgatctttgatgcctattttctacattaaacaccaggctagtgcttcacgtggtgtctcaaccgtgattgacgatcaagaacaaccgcgttatttacttattggaaagcgtgggattcggcatgacgtattcagcctttactcactcaccggcgacttactcggtgaaattcgccaagtcacaattagcccctcacctgactttgaccttttccaaaacgatgaacggattggtcaactcaaaaagatctggggcgtctggcatgagtttatctatgtcaaacaacttaattggttaattatgggagatttaacgcaaaatcaatatcgcattatctaccatacacaacccatcatgcaagcgaccaccattctagcaagcagcggtccagcctttcaattgactgtcaaccaagaaaaggatatcgtcccctgtattttgattgccgccgttttaaatcattgggcctataaccaacccaaggcactgattcggcgttttaagcctagtttgcgattcgaatagtcagtaaaaaaacgactaatcaaatgattagtcgttttttggtctagctcaagactcccatcgaatatatataagcgctaacatttaaaattaaattgattcttttcttttaaattggtatagttgaatatgcaaacttaaaattaaaggggtcttctcaatgccaactggcgtgattattaattcattatccgtcttatttggcggtctattcggtagtttattgggagataaattatcaactaaatttaaaacagaactcaccttaatcttcggtgttgcttcgatgggaatgggcatcaatgccattattcaaatgaagaacatgcctgcagtcatcttcgcagttgttctcggtactgggattggcctactcattcacttcggtcgctggattgatcgcggtgccgtcttgatggaacggccaatttctaaatttttccgcgtaaaaataatacgctatcagataccgaatttatttcagcactcgtgacagtgattgtcctcttttgtgccggtgggaccggtatttatgggacattagatgctggtatgacaggcaacaatacgattctaatttctaaatcaattctagatttctttactgctgccatctttgcctgcaatcttggccccgtcgtttcaaccattgcgattccgcaattcattatcttttacatcattttcttactcgccaaactcattttcccactaacgaatccaacaatgcttgcagatttcaaagcttgcggcggcctcttgatgctcgccactggctttagaattgctaaaattcgcgaatttccaattgcagacatgataccagcaatgatcttagtcatgccactgagctggctatggacgacaatgattatgccattactttaatctgaaaagagccgacaacaattgttgtcggctcttttcgtgttaaagctgtttaatcatatgatcatattgatgatcaccaatcattaaatctccttgtttaacaaaacccattcgttcataaagttttttagcgccaggattttgtaaatccacacttaagctaatctttttttcaccacgtgcttttaaataatctggtaaggccttaagtaactttgtccctacaccatgcccctgtgcatgttcagcgacggcaagtgtatctaaataccattcccccggttgtgcttccttatcggtaaagaaacgcgttgtctcaggtaagccgatttgtgggaataacggtgctaatgcatcgtcgatatgggcttccttttcttctgggaagcctacaacaatccccaatacttggccgtcttcttcataaactagtgtgttagcataactataccgatattcaggcattgcaaaggcctgttctaaaataccaaataaatcctccaacggaatcttttggaagagtggcatttccatttcttcaaaaacaatgttaatgattggtaagacactcttggcatctgcaactgttgcttgacgaatcattcaaagacctcctctagtaatctttttatcatacggaggattgcatagcacgtcaactgttatcatgctaaatcagaccggtagtcggccattttcttagcaaataactcaccattggtcggtggcgtgtacgtcaatgcattcgcacccgcttcaatcgtcgctaatatactagcttcgtttttacccccagttgccataatcggaatttcgggatattgttggcgaattgcactaacaattgctggggttttagccgcgccactaacgtttaaaattgaaactccagcttcaatctgcgcggcgtaatcctgttgttctgacacaacagtacaaataatcggaacgtcaacaacgcggttaatcattttaatcgtctccaccgaggtcggtgcgttaaccaccacgccaatcgaaccggcggcctctgccaataatcccatgtacgcggaccggctgccggccgttaagcccccaccaatcccattaaaaacggggatcgtcgccacattgctgatggcattcatgacagctgggtgtggtgtaaatggataaactgccaaaacagcgtcagcatttgtattattcacaatcgcaacatcggtggtaaaaataattgttttaatcttcttaccgaggatcttaatccccccaacttgtcgcgccacagcaggtggtccgacaacactggtttttaatggtgtataaatctctggtacgaattgctctgtcatccgaatccccctctttattctgttgctttaataatggctactaatcgttgttctagcacgaccaaatcaattgcatttaatcgcgcaaaattgatgcgcaacgcatctgttttaagcccaaataatgatcctggtgcgacagcaagctgatgatcaataaaggtttttaagcgtaatttatggttcggatgggtcacccaaatataataacctcccgctggtaagtaaacgtgccaatcgggtaataccctttcaagcatcttataggttgcttgtgcacgttcttgaagcgtccccttaagttgatccaactgcgtttgaaattgcggatcccccatcgctaaggtcaccatgacttgcgccataatgcttggcactaaatccatttcatgttgcacacgggtcaactgttcgatgacttgcggagtagcagctacccacccgattcggctactagcccccataattttggacaacgaactaatataaataacattatccggatcaagttgctttaacgttgggattggcctagttgtatcaaatcctaaccaaccaaagacatcatcttctacgattggtatttgatgcatctggcataaatgaacaactgcttttcttttttgaaaactcattacgtgccccgttggattttgataatctggattgagaataaccaacttaacacggtgcttaatgattagctcttctaaagcagtcaaataaatcccatcagcatcaactgaagcttcatagacacggacacccgtcgcttcaaacaaagttgagtcatgaaaaaaggagggtgattcaattgcaacagcatcacctggcgtcaataaaccctgtaatattaaaaagagtgattgttgcacaccggcagtcattaataactgctcttcggtaaaaaatagccgtttattgtgttgatccaattgattaattgccgtaataagtggttgatagcctcgtggtgtctctaatgcttgtgcagtaataaaatcttgccacgtcaatgcaggaaattgaaattgtgggactaattctaatggtaagtcacttgaataaacatcaattaacttttcaggttttcgtctaatcagttgttgtaattggcgccgttcattttgactttgtgactgacgttggctgatcaaataagtatgccaattgacccgccttgcctgtggtcgcgcttgctggctgacaaacgtcccgctaccaacgcgacgttcaatcacgccatctgcaaccaattcatcagacgcacgtgtcaccgttgaacgattgacactcaataatttagctaactgacgctctggcggtaattggtcacctgaacttaattgtcctttatctatcaagctaataatcatttttttaattgccatatactttggcttttgttcaggtaaatattgtaaccattcaatcatttttaacacctcttatttagtttacaaattggatggtaaaaaaacaagccaattggctgttgttgaacattctattcttctctatgatagttaagaatagaattttggaggacaactatgcaaaacattctaaccattgccggctctgatactctgggtggtggtggcatccaggccgatttaaaaacgttcgaagccttagaaacgtttggggtcagtgccttaacttgcatcgctacattgctaccagacggtcacttgaaaatccacaacttacctgaggataccattttggaccagcttgatgccattttaaactacgtgccactaacgcacgttaaaattggtttggttcatcaaacggaaactttaaaagccatctgtgagcgactacgacagcatcctgaattaaccatcatcgctgacccggtcctcgtctttaaagaaggcgccattcttgcgcagcaagcgtacctcgacacgttaaaaaaagaactactgcctttgacgagcgttgtcaccccaaacttgttggaggcccaacaactcagtggtctttcgtcaattaccacgcgtgaggaaatggtcgaagctgctacaattatccaatcatttggccccaagcacgtcattatcaaaggtggtcaacgattccctggtgagcaggccgttgatttattaaaatcgggcgcaacaactcattatttagaagctccacgattggaaacaactaccattgatggcgccggttgtacgctttcggcagcgattgcggcggaattagcacaaggaaaatcgattgaagttgccgtggcacgcgcaaagaaatttgtttatgccggtttaaaagatggtattcatctacgccatggcctggggaatgtctggcagggggctactaaacatgcactttaataaacgtcaattaccattactcgcgatgctcaccgcattgaccgtggcactctctttgttaatcatcatcccgattccggcgacgaagggctttgtgacgctctgtgaggtcggtatttatacaacggcgatcatgctgcgaaatcctggcggactcactgtcggagccctgagtggcctattaatcgatctattatctggttaccctgagtggtgtctcttctcactcatcattcatggggggcaaggcttcgttgtaggtcacctgactcgtaatgattcaatgcgaccaaagcagctgattatccccctcatttgcggtagtatcgtcatggttgccggttactttttagctaccagtttacttttcggctgggctgccggaatcgcttcgattttcagtaatattgttcaaaatggacttggtatcgtggttaccatcccgttagtcactagtttatcccgtattcgaccacaattatttaaccactaggagattttttaaatgacaaacgaattacaattaaaccaaattcaacaagacttaacaaagatgactcaggatgttctaaacgaagcacacttaggaaatggtgatttgttcgtcctcgggtgttcaacgagtgaagtcgtcggtggtcatatcggtaaggcttctagcaaagaagtcggtgaagtcatcatcgcaacacttcgtggcattctcaatccattggggattcatttagccgtgcaaggctgtgaacatattaaccgtagtttggtgattgaacgtcaggttgcccgcgcacacgactttgaaattgtctcagttgttcctgctatgcacgctggaggcgcctgctccgtcgctgcatttgaacaattcagtgatccggttgaagttgaacatatcgttgcacaagctggattagatatcggtgatacggcgattgggatgcacgtgaaattcgttcaagtccctgtccgcccaacccttgatacattgggtagtgcacatgtcacagctttacggtcacgaccaaaatacgttggcggtcctcgagcaacatatgcaccaactcattaaacgcaaaaaaagcctcgttctttgaacgaggctttttgaatattatttattcaaccgtgacactcttagctaggtttcttggctgatctacatcataccctctatgcaaacttgcatagtaagcaattaattgaccaggaatgatccccaataatggtgtcaataagtcgtttacggttggtaaaatgatctgatcatctgcttcagcagattcttcgctgacaatcgtcaaggcttttgccccacgcgcagtcacttcttgtaagttaccacgcgtgtgcgcaatcgttttggcatccattaagaatgcaataacgggtgtcccctcttcaatcaaagcgatggtgccatgttttaattcgccggctgcaaatccttcagcttggatgtatgaaatttcttttaacttcaaagcagcttctaaactcaaggcgtaatcttcaccacgaccaatataaaaggcattgcgtgttgtttgtaagtaatcagtcgtcaaggtttcaatctgttctttttcgctcaataaagcttccatgccagtagcgactaagcctaattcatgatgtacatcgaattgttctgctagcaccagttgattgtggcgtccgagtgcaacagctaagaataattcaactgcaatttgtgcagtgtaggctttcgttgaagcaaccgcaatttcggggcctgcatgcaataataatgtataatcagcttcccgtgaaagtgttgacccttggctgttagtgatggttaagcttggataatgcaaggcattagtttgtaccaacacttggcgactatcagcagtttcgccactttgtgttaaaaagataaagaatggcttttcagataatagcggcatgtgatagccgaattcactagcaacatgtacttcgacaggcttgtgcgttaatgtttcaaacaaggtcttcccgattaaaccggcatgataacttgtcccagccgccacgatgtagaggcgatctgcatcattcattgcactgagtaacgctgagtcgattttaagctctccatcaacagcaacgtattcgttcaataaacgccgcataacagctggttgttcgtcgatttcttttaacatgtagtgggggtatgtgcccttgcccgctgcatcagcatccatttcaacatgatagctttcgcggtgaataaaagtgccgtctaaatcttcaatttgaacactttgtttcgtgagtgtcaccatttcacgatcatggatttcaataaaatcttttgtttcattcaacatcgctaatgcatccgagcacacaacgttaaagccatcacctacaccgattaacaatggcgatttattcttagcaacgtataaggtgtcaggatcatcacgatcgaccatgacaaatgcgtatgagccttcaatcaacgttaaagccttccggaaggcttccttagctgataattgttctgtcttagcaaggtaagcaatcaactgaacagcgacttccgtatcggtttgactgacaaaatggacatcctccaagtatgtttcttttaaagctaaatagttagttaacacgccgttgtgaaccaagtaaaaacgaccatcttcagaaacatgcggatgcgcattatcacgactcgcaacaccatgcgttgcccaacgcgtatgaccaacaccgattgttccttgtacttcaggcccaaccgctgcttctagaacgctaattttaccgggttctttaactaagtagtcatgcccagtttcgctgttcacgtaaatgcccgctgaatcgtaaccacgatacgccaacttctctaatccgtttaataaaatttcagttgtcttttcattgccaattacgcctacgattccacacattataaaaatcctcttttcaactttggtttaatattctttaatcaattggtacaacacttaaatataatagcaccaacgattttaatgtcaacatttttattggtatatataaatttataattttggtatagtccaaatattttccgctatctagcgcttttatgctatactaagaccagtcaattttagaaaaggagtttctgtaatgaaaaagagcatcttgttaattcgaagtatttctcttcttggcctattagtcggactgagctttatcgtcgttgcacctaaaacaatcgccttacatattgccgccaataacattgtcgattcaaccggtagcaaatacatgctactattagaacccgctttattaatcatcgtgaatgaagtcagtgttttcaatctcaaacgttaccgcaaaaattatcatttgactgatgcacctatcatacttgtcaaagaatggtatctgatatccgctgctgttgtcttattggttgtctttggttttctgatgtacgaacaagtcacattgcgttagaagaatgggctcttaaataaaattgcaccaaaaaaacccgtcaacacaatgttgacgggcttttttagtttgattcaagtgagaacgtgcttttcaagctagtgctcaaaagttgaccaacttgaacgcgcttctcgagtagtcatttccggtgaactgcaaaatgggaattatggcaagaaacaccataacccccattttactgttaatcctcaaagcctaaccaactcgcgtcagcactccctttaattatgcgccaatttcagctttaacaaccgctgcgatttgatcagcatattgatttactttttcttctgttgcagcttcacacattactcgtagcaatggttctgtcccacttggacgaaccaagacgcggccatcaccattcatttctttttcaacggtatcaatggcagcttggatcttgtcatttgttaaccaagcatccttgtccttaactgttaagttaacgagtttttgtgggtaagtttgaacaggggctgctaattcagataacttcttaccagtttgtttcatgacgtttaagagttgaatcccggttaacatcccatcacctgtattgtggtaatcaaagatgatgatgtgtcctgattgttcgccaccaaggttatagcctttttcacgcatttcttcaacgacgtgacgatccccaacgtctgtttggactgattgcatgttgttggcttcaatcgctttatacaagccgatattactcataacagttgtgacaatcgtatcttgttttaaacgacccttatcagataaatattgaccgagaatgaacataatcttgtccccatcaataatattacctaattcgtcaactgcgatacaccgatccccgtcaccatcaaatgctagtccaacttgcgcgcctgtttcaagcactcttttagcaacattttctgggtgtgttgaaccgacaccatcgttgatattcaaaccatctggatgggttgccgttgttgtaaattctgtttctagatcagcaaatacgcggctaattaaaccactggttgaaccgtttgcgccatccaatgccactttaatcccagctaaatcatcaggaatcgtatgttctaagaattgggtatacttcaaagcaccttctggatattcttccaccgtccccagaccagcgccttctggacgtggtaaagtatcttcttcggcatcaataattgcttcaatttcttcttcagttgcgtctggtaatttgtaaccatctgcgccgaagaatttaatcccattatagatagcggggttatgtgaggctgaaatcataatgccggcacttgcttcttgaaccttaattaaataggcaaccgcaggtgttgtcaccacgcctaatgataagacttcaatcccaactgataataagccggaaatcaaagattgttctaacatttggcctgaaatacgtgtgtcacgagccaccaaaacctttggccgttgatccttatcagcgtgcttggtcaaaacgtaaccacccgcacgtcctaatttaaaagccatttctgggcttaattctaagttggcaacgccacgtacaccatcagttccaaaatactttgtcatatttaattatctccattcatcctgctaaaatctttagcgttgattattgatttacatcggtatttgctttactactttcacttgagcttgattgactacttgattggctgttacttgaacttgactcaacgggcgcactacttgatgtttgtgccgtactttcagacggcgcttcaacagtactagtagcactcgtattggtcgtatctggagtcaccgtaattgtcaccttaatggcacttggcgtactctcataaatgttgtctggtaaagccactttaaccgtctttgaagttgaactcgtgattgacgataaatcgacactcactggtaacgacgtcaacttggctaaagctgtttgacgaccatacacggtcactgaatcagttgttgatgacagactgtagctgtagccacttttttcaccggtcttttccaaactaatcgggagtgttttcttactcatttgaaccaatatcttaacgttaacggtttgtggtgaaattaaaacatttaacgctttcccattgcgatcaacagcttgcaacaagacttcttcattgatgtcttttttggtgccttcatcgggatcaacagtggctactacttgcgacacagcattcactgctgattttgcaccactgacttcaaccacgtcttgacttagttttggatttcctagactatacccggccgctaagttttctttcttaacattgacctgcacagggaattgctttgtcactttgtgctcaatgtggaccttaatttctttaggttcaatcgtgactttgatatctttattaatccccgtctgttttaacttgacggtgtgatcaccaggacccagcttcgttaaatcgccaatcacgcggaaatttaatgtgttaactgctgatgtgactagcgcattcggcccggataatttcactttgaccttttgtggatagccggtaatgaaataccgatcagtatccgcattaatctggagcggcacttttacggtttccgtgcgggttgctagcatctgtgtatcattgttattcgtctggcgcgtcgtgttaatttcatccaaattgacataaccaaacagtaacaacgctagaaataacgctaaaattcgatagagccatgggccttcaacaaactttttcatcatttctggcctccttttttgaagccatcaacaaattcttgtaagagactcgttttgttttcctcttgggtaatcaaatgcgagttgaagtacttcatataatcatcacggcttaaatcacgcattaactcgttattgcgcgttaatgtgacaccaccggtttcttcagaaacaacaatcgtcaaagcatccgttacttcactaatcccaacggctgcccgatgtctggtccctaattctttgggaattaaattactctctgaaagtggtagataagcggccgcaacggcaatcttatcatcgcgaattatgaccgccccatcatgcaatggtgtattcgggataaagatgttaattaataactcccccgtcacatccgcatccaaatcaatcccagtttcgatataatcttccaaaccggtattcatttgaattgtaatcagcgccccgatacgccgtttcgacatatactgaatcgacttatcgagggctttaattaaattattttcttgttcaattttgggattaacgccgcgtcgtagtagcgatccacgtccgatatgttccaaaccacgtctaatttcgggttgaaaaataacgatcaacgcaatcacaatccagctgataaattgatccataatgtacgaaacagttcgtagaccaatgtaccaactgataaccttaatcagcgcaatgactataatgcctttaaacaattggacggctttggtaccgcgaatcaacatgattaatttatacacaaaataccagacaacgatgatgtctagcacatttgcgagcatccgccacgttaataactgtgaccattcaaatgacataggtaacctccatccaaaaaaattctgtatctattataccatgaaccatttcaatctgctcattgtacttttaatgttgcattttaaactctaaaaataaatcattataacggccaaccgcagttggtgataaatcactataaacttgcaagcgatcgatcaccttttgacttggataatagcctgggttattccgtgttgctgctggcaagagtgctttggccggtatattgggcgttgaataaccaatatattcagcattttgagccgcgtttttgggctctaacataaagtttaagaaggcataggccgccttttcatgttttgccgtcttgggaatcactagattatcaaaccatagattgctgccctcttctggaattacatagtgcaaatggggattattatccaacatctcggcagcttcaccggaccaagtcacagcaacactcgcttcattttgaaccatatacatcttaatttcgtcagctacaatcgctttgacatttggtgccatctgatcaagcttgtccttagccgcctttaaaaccgccggattcgtgctattgactgactggccattttcgatcaagcccacggccatcatatcccgagcactatcgactaccataatttggccgcgataatctggtgaccatagatctgaccaatgtgtcagtggttttttaaccaattgatcgttgtagataatcccgagtgtgccccagaaataaggcaatgaatacttattcccaggatcaaatgattgattcaaaaaatccttgccaatattttgatagccggttaagcgacgatgatcaatcggtttaagtaagtgtgctttgcgcatcttttcaatcatgtactcacttggcaccgctaaatcgtaagcagtcccaccctgcttaatcttcgtgtacatcgcttcgttgctatcaaacgtctcaaccgaaacatgataaccagtttgcttttcaaactttttaataagtgctgggtcgatataatcgccccagttatataatgttaatgtattatttttcgtataaccttgtgatttttgtaattcaaccgtcccaaaccaaagggctgcacagaccactaaaatcgctaaagtgatgcgtcctaatttattcattttaagcccccgctttccgtttacgccgtgctttttgggcttggcttctttgattcaataaatagtagccggccacaaggattaaggagaagacaaacatcaaggcagataatgcgttgatttctagactaattccttgacgcgctctggagtaaatttcaacggagagcgtttcaaacccgttcccagtgacaaagaaggtcacggcaaaatcatctagcgaataggtgaacgccatgaaaaagcctgcaaaaatgccggaactaatgtacggtaaaataactttactcaggacttgccagtcagtcgcacctaaatcacgtgccgcatcaactaatgctggccgcatttcatttaacttcggcaaaaccatcaagacaacaatcggaattgaaaaagcgatatggctcagtaaaactgaaccaaagcccaaaccaaaacctaagaacgtgaagaaaattaaaaaacttgccccgataatgacatcgggtgaaaccattaaaatattgttcagcgataaaatcatattgcgcacacgccgttgcttcgttgaataaatccctaacgccccaaacgtccccacaatcgtcgcacataaagatgatagaatcgcgattaataacgtttgtaacacaatttcaatcatccgagtatcttcaaacaaggcctgataatttgcccaggtaaatgccttgaagccattcatattatccccactgctaaatgaatagaaaatcaaatagaaaatcggtgcgtacaataagacagagacaagcactaaccaaacgttttgccatttcatttttttcatttgttagtcaccttcttctttgctttttgctccccggttaccagcatgattaagcccatggcgacgattaagaccaccccgatggtcgagcccattccccagttcattgttgtgaggaagtgttcttcaatcgcagtccccagcgtaatcacgcggttacccccgattagacgcgtcaacatgaataaggataacgatggaataaagatggcctgtatcccggctttaaccccagccattgttaacggtaagatgactttcgtaaaggtttgccaattacttgcgccaagatcacgacttgcattgaccaatgatggattcaattcttctaaactattaaatatcggcaaaatcataaacggaatttcaatataggtcgccaccactaagaaactgaaattcgtaaataaaatctgttgtggcccaatcccgaaccaccccaaaaaatgattaatggcaccatcttgactaaaaatcccgataaacgcataagctttcagtaataagttaatccatgtcggtaaaataattaataatagccaaagttgtttatgtttcgtttgatgaagccaatacgccgtcggataactgattaatagcgtaatcagcgtaattaaaaaggcgtaccataacgaatttaatgtcatcttcaagtaagtgcctgactggaaataggtcgtgtagttgaccaatgtcgcatgcccattgatatcaaagaaggactggtacacaatcaatgcgactggtgcgaggacgaacaaaattagccagagggcatatggtaagtaatataaccattgttttttacgcaattgccttagtcctcctcttcgtaactttcaagtcgtgcatcgaaatcttcttctgattccccaaaacgcatgatgtgcacgtcttctggttcaaagaataagccgactcgttgaccatctttagctgggttagttgaatgaatcaaccaccggttttgatccgcatcataggccgtaatttcataatagtcaccacgaaatagctgcgtatcaaccgttaccactaattggccttggtcaacggcaacaatgtctagatcttcaggacgaagcaccacttcaactgcttcgttgacccgcatcccggcatcggcacattcgaactgcttgccgaccatttcaacttgataatcagcaaccattttacctggcagaatgttactttccccgataaaatcagctacgaaatggttgatcggttcgtcataaatgtcgacaggtgtcccactttgcaacacgcgcccttcgttcataacaaaaatttcatcactcatcgctaaggcttcttcttgatcatgcgttacaaataagaacgtaatccctaatcgttgttgtaaatcgcgtagttcatattgcatatcttttcgtaatttcatatcgagtgctgatagaggttcatctagtagcaagacttttggttcattggccaaagcgcgcgcaatcgctactcgttgttgttgcccacctgataactcactaatttcgcgattctcatatccggcaaggcgcaccaatttaagggcttcaatcactttttctttaatcgctgcttttttaactttacgtagatttaacccaaatgcaacattctcaaagacatttagatggggaaacaaggcataatcttgaaaaaccgtattgacttggcgcttattggccggtaaatcgttcatcttctgcccttcaaataaaacatccccggcagacgcattggtaaatccggcgataattcttaaaatagttgtcttaccacagccagacggcccaagtaaggtataaaacttacctttttccaacgcaatgtcgatgccctttaaaatttggacatcgtcgtattctttaatgacatttttaaattccaccattggttgttgcatcttcttcttcgtcccctttatctttagcactctcagactcgttattagttgactaatatcctattaattataccgtttccgagacgcaatgccaattcaaagcgaacattgttgtataatggagttaaataattatttagaaatgaggttgtaatcatatggtcgcctatcaagcactcgttttagaacaaaccgatactactgtcagtgccacttatcaaactaagttaacgccagacctcgctaaagacggggtgttagtcaaagtcgcctattctgatattaactacaaagaccggctcgctatgaatcctaaaagtggcgtcttacgtcactaccccatgacacctggcgttgattttgctggcgaagttgtcgaatcggataatccgttctttgaagcgggcgatcaggtgttatgtacgggttatgaaactggcattacaatcgctgggggctacgctgaatatgtcaaagtccctagtgaatggctctttaagttgcccgaaaatcttagtcttgctgaaacgatgcagtttgggacggccggtttcaccgccgcaattgcgctcagcaaattattacgccaagcctttacagccgatcatgacaccccactcttaattacgggtgccactggcggagtcggaagtttcgcacttaccatcctcgcgcagcttggcttcacaaatctaaccgcaactacgcgtgacttgcaacaaaccgattatttattgcaccttggtgcgacccatgttattaatacagctgacctaactgctggtccgcttaaagcgctcagccatcagacattcaccggggttattgatacgcttggcggtcctgttttagcccacatcttaccgcaagtttgtgccggcggattcgtagcaacttgtggcaatgccgctggtgcaaccctagaaacaacggtgatgccgtttattctacgtgggattaccttagccggaattgattcagtctattacccgcgcaaagaccgtaaagaactctggcaattactcgccacgacgtttaaaccggaaatttggccaacagttaacttggtcgccttttctgatttagcccgagaacttagccaaaagacgcataaaactgggcgcgtactggtcgccttttaacccaaaataaaaagccccgctaaatgatttggcggggctttttatcgtctaacgacgttcaaattgatacttaggttcttcaagctctggatcgtaatcaacctgtaaatcataatcggcaaaaaaccattcgtccgattgactcgcaaaataggtgataccatctttaacaaccgaaccaattggctgctcaacagtagcgcgttccatgcccaatgaaaagccatcatgcacggccgtttgaccatacactttgccaaaaaagcggactgcatcccccgattgtaaggctaattcgtcgcgaaaccattgacttgctgcatctgacacctgaatttgcatgttgaactcctcctgattaatcgactagttggttcttaatcgcataaattgccgcttgggtgcgatcatccacttgtaacttcgccaaaatatttgaaacgtgcgtcttgaccgtttttaacgtaatgaataattcatccgcaatctcttgattactacggcctttggcaatcaagcctaagacttcacgttcgcgattagttaagtcttcatatagcttaggttcagccggatgtgttaagcgattcatcatcttattcgtcacttctggctctaaaaccgattgtccttgcgccgttttacgaatcgtattggcaatttcctcggctgtagaagtttttaatatgtaactggccgcaccggcttcaatcgccggataaactttctcatcatcgataaaactcgttaagataatgattttggcttcaggccacgcctttaaaatcgttttggtggcctcaatgccatccatctcaggcatcactaagtccattaaaatcgcatcaggacgtaatgcaagcgccttttcgacaccttctttaccattgacggcttgatcgacgacatgaatatcgtcttgaacccctaaatacgttgagatgcctaatcgcaccatttcatggtcgtctactatcaatacattaatcacttaattggtctcctttaatagtggcactcgaatttcaacactcgttccctggttaggtaaactaataatttttgccgtccctccaacactatgggcccgttcgacaatgttgtttaacccataactgccggctttttgctcagcattcgtatcaaacccggtcccgtcatcaattacctttagtaaaacactctgaccgagttgtttcaagtatacttcaatctcttgggccttcgcatgccgtagtgtgtttgacagcaactcttggacaattctaaataaattatcttcgatgccacttggtaacgttatgctatcaatgtcccatgtaatctgaatcgcaattttggtcttcaattcgttcaataactgaatgatcccatcgcgtaaactcttgccttccaaattaactggtcgtagatgcaagagtaaggcccgcatttctgattgagcctcatttaacacccgttcaactgtcgttaaggactgcaacatctgcgcgttatcagcttgtttttgcgcaacttcactgagtgccgacaacatcatcgtcgccgcaaatagttgctgactcactgaatcatgtaactcgcgtgctaaacgatgccgttcttgcgctagaatttcttccttggtttcaccagcaatcacggtcggccgatcactataactttgaatctcttgttgtaagcgtatcattttttggcgtaattgttcaactgtttgctcgattgacatcgcgtagtcattggtttcgctctgtctaatctgaaaaacaggcgattcatactgtccagaaagtaaaaattgtaactggctttcagtatgggataattgcttacgtacgacaagatagacgattgcggtaactaaaaagcctactgccattgcggccaccacaatataaacaatcagtggtacatagaataattgcttcgtggccaaactaatcagccattgttcctgatgcgtactgtagaaatacgcaaaaaataacgccactgaaaacagaagcgtcaacaaactcgtgctaatccatataaagctccgcgttaacttgctcatactaagatcacctcaagatcaccaatcattacgttggtaatgattttaaggtggcgactttcttcatcatagtttgtactatacaactgaatcgactcatttttcaaattatagtgctgattgtcgattgtcacactccctaacattgcagagtgatcaagatagacaccggtcccgacaggcactaaaatccgtgtctttccaaaccccttacggatgacaatatggttgtcattcttgggtaaaatggtgctccctaaatcgataattgtatcaccggcagcgaccgcgaagttaatatcatcccattcaaaaatgttattgccaattgtctgatgaccaaaccaactatgccgcttgactgttgtctttttcgcggtgggttccgtcgtattaacgggaataaattttttcttgcgccaaggggcattatcaaacaactgattcatattgcggctgctaaactgtcccattcggctatgatttaaggctaaaaagacgaccgcaacaataatcattaaccataacgagaaattaattaacagtggtaccgtaacagctacgcaaccgaccatcgttaacaaagtcgtccagacaccgattttacctttactacgacgtttgttggcccagactaagagtaaaatacctgcaatgatgaacactaaatttgcgggtatcgtaatcatctgccaaatgaacgtcccgaagataatcgcttctattattaaaaaaacgcgccagataaacggcatatttacggtctcctttcaactgattaatattattatacaagcaaaccagataaacaccaatccgtctcaaggctgattaacgaattaacggcaaaataaaaaagccacgggattgatttccgtggcttttttgaaacgtgctttttggctgcaacaacttctgcttaatctaaaattggcagtcatcctaaaatctggatgactgccaattttgtattaatgctcagttgctaaccgcacccaaaagcactctattcttaaacgtgctttttcgaacaaccttttccggttaactacaaaacgggcgtcatggtcaaaattcgaccataacacccgtttttacgttaatcctcaaagactaacccgttcgaaacgcactttatttaacttctgtaattgtgacgtgcatgtcgccgcctggtgtttgcacagctactttatcaccaacgtgtttgccaagtaatgcttgggcaattggtgaatcatttgaaattttaccactgaatgggtctgattctgcagcaccaacgatttggtaagtttcttcttcaccatcttcgtcgtctgtaaagctaactgttttaccaacagcaatttcatcagctgcgatgctatcaacatcgattacttctgcaaagcgtaacatattctcaacttctgcgatgcgtgtttccaatgagctttgttcatctttagctgattcatattcagagttttctgataaatcaccaaagctccgtgcaattttaatccggtcaatgacttctggtcgttttaccattttgagtgtttctagttcttcggctaacttttctttgccttctgcagtcattggataagttttttgtaccattttatccacctctttattttaattaataatactgactatcttaattactgtgtacgtccttgtcaaatctcaatctttaatcggcatttaggattgattgaatctttgttacaagtaaatcaatggccacgcgattattgccaccttctgggacaattaaatcagcgtaacgcttggttggttcaatgaattcatggaacatgggttttaccgtcttaagatattggccaaccacatcatcaaacgttcgaccacggctttccatatcgcgatgcatccgtcttaataaccgaatatcatcatcagtatccacataaaccttaatatccatcaaatcccgtaaccgggcatcagccaatacaagaatcccctccaagataataacatcttgcggttcaacccgttgaatttcctccgtccgattatgaattttataatcatagaccggttgttcaatggcttgatgattttttaacattaatgcttgttcgattaataaatcgttgtcaaaagcgtctggatgatcataattcgtttgttggcgttgttcaaacggaacatcttgccgtttgtaatacgcatcttgtggtaataacatcactgagtgattcgcaaatttttgggcgatagcctggctaacggttgttttcccgctaccggacccgcctgtaacgccgataatgatgggtgcttttttttgactggacatgggacgctccttttattctcaacttctttttgggcaaacagaagtcgacctccaatagcggtcgacttcgataatcctaaatgaacctaatcttcaatcgaatctgttgtatcgttatgttgttcgaaggttcttgagtaatatactttacctgtcttcaagttagcaacaaagtagagataattttgatcacgatcagctggattcaagacggctgtgacagactgtaaactaggtgagttaaacggtcctgggccataacctttattgatatataagttatatggtgaatcgactttagtatctttgttataaaggtgtgtcttgtgggtatttaatgcatacattactgaaatatcagattgaattggcatatcgatgtctaaacggttaaagaagacaccggcaatcttttggcgatcgacggctgtgaccccttcacgttcaaccaatgaagctagcgttaacgtttgttgaacggttaacttcttatccttaatggttgcataataaggttgcatcttttgatccatcgttgaaaccatttcggtgataatttcttttaatgtactatctttataaacttcgtaagtggctgggaaaaggtacccttctaagtgatagcggacatccttttgagccattgttgatgacaataatgcagggtatttcttctctaaacttgctaagaattgcttatcattcgcttgtttgatgaaggctgctttagagaattttgtttgtttaccaacttcggccgcaatttcttctaaagtgaccccttctttaactaacaatttgcccttcacatcgcgaggacgggttggtgtgccttctttttgtaagttagagatgatcttatctaaccccattgattgtttcaacacatgataaccggcttggaaatccgagaaattatgagtcttcacataataattaaagactggcgcgcttcgaattaattttttatcctgcaaaatagcagcgatttgtttattcgttgagccgttgggaatgcgcacggtaatttcttgttttgctttggtgtcgtatggtttaagagatgcttgtacgtagcgatatcccatgaatccaataatgacaacaagcgctaacagaataccgataatccaatagacaattttatttgctgcttttttttctgcacggcgttcttcgtacaatgattgtgccgctttttcttgatttactggctccttttgatcaactttcttcaaaggatgacctcctaattgctcttttaaatacaatccttaaaacattataccaaattattcaaaaattgcattaaagattcgagattaacggattttggcatcaaaagtagcaactaattcagcgactactttttcaaaagcagcgttaacttcttcttctgttaaagtagctgcctcattgaggtacgttaaggtgtaagccattgacttctcaccagcctcaatatgactccctgcgtaaacatcgaaaagttcaactgaaactaagtgggcgccaccctttgctttgatggcttcaacaattgcggcatttgaaacttgatcagacacctgaattgcaatatcccgcgttacttcagggaatttaggtgctggtttagcaatcactgtttgggttggcaaggctaggatttgtgctaaatctaattggaaaacataagtttcttttaaatgattagctttcgcaactgctggatgaatttgaccaacaaatccaaccagttgttcaccaacgtaaatggctgccgttcggccaggatgcatttctggataagcttgtgttggttgataactgattgcatccgctaagttgtaacttgccatcaacatttcaaccacacctttgattgtgtagaaatcaactggtgctgcggcagcttgccaagtcttcatttggcgattgccactcattaagccagccacatattcaatttctgttggccgaacttggtcgtctgcttgttttaaaaatacccgtccttgttcgtatagtgcaagatcagtttgtttacgtgccacattgtaagcagcatcgtccaataaaccagtaatcaagttcatgcgtaagtgcgcatgatcttgcgtcattggccaatcaagtgctgtcagcgccgaatcaacaagcgtaaattgacgcgctttttcaggggtcgttaatgcataactaattgcttgcgttaaaccagcaccttcaagtgtatgccgggttttacggagtgccttttgttcagtcgttaatgccccggttgtcatatcgccagttggcaatgtgcttggtaagttatcgtaaccgtataaacgagcgacttcttcaatgatatccgcttggatttcaatatcccaacgccgtggtggaatggttactgttaaatgattatcagtattgaccacactaaaaccaaatcgttctaataattcaacaattgtttgcgttgcaatctctgtgcctaagacgcgattaatccggtcagcttcgatttcaatcactttgtcagttggcactaagttagttgggctaaccgtaccagcagtcacttgcccattaccaaggtctgccatcatcatagcagcagcatctaaggctgtttgaacatcagcaacattcacgcctttttcaaaccgtgatgacgcatctgaacgcaagttatggcgttgagccgttttacgaactgcagttggtgcaaaaactgcggcttcgataatcacatttttcgtatcagcagtaatttgtgagttcaaaccacccatgacccctgctagcgcaattggtcgatgaccatctgtaatgacgatatcttcatttgttaagtcatgtttgccttcatcaagggtcgttaatttttcgcccgtcttggctaaacgaacttcgatttgtttgtgatcacccgttagagcatccgcatcaaacgcgtgtaaaggttgcccatacgttaacatcatgtagttcgtcacatcaacaaggttattaatggggcgaatgccagcattccataaacgcgtctgtagccacattggacttggttggacggtcacgttttgcaacatacgcaagtgataacttggtgctaattgttcatcagcaacttgagcagtcaattgatcagctgtttgaacgttgctttcagtcactacgatatcttcaaaatgaggtgtcaatgattcaatggcggccacttcatgggccacaccgtggatgccaagcgtatcggctcggttagcggtgaggtcaagatcgataatgtaatcagtcatcccaagagcttcataaacttctgtcccaggttcaattgcttctgggaagacaaagatgccatcaacatattccttaggcacaacgctatcggcaaagccaatttcttgtaagccacaaatcatccccattgaaaccacgccgcgcatcttgccttttttaatcttaacgttgtcagcaatccgagaattaggtaatgcaacgactacatattggccagccgcgacattgggtgcaccacaaacaatttggaagggttcatcttcaccaacatccacttggcaaacattcaagtgatcagaatccggatggggttcacaacttaaaatatgtcccaccacaatttttttcaagcccgcgctcttttgcgcgacatcagccacttcaatccctgttcgggtaattttttcagccaatgcctctggggcagttgttaaatctaaataatcttttaaccagttgtaagaaactttcatggtctagccctcctgtgtgaattgatttaagaatcgaacgtcatttaagtagaagttccggatatcatccacaccatatttcaacattgcaaagcgatcaaccccgagcccaaaggcgaatccaccatagacatctgagtcgacaccgccggcttttaagacgttcggatgtgtcatcccagcccctaaaacttcaatccagccagtttgcttgcagacattacagcctttaccatcacaacggaaacaagaaatatccacttcaacagatggttccgtgaatggaaagtaacttggccggaaacgtaaatcacggtcttcaccaaaaatatggtgaatcgtgtattctaaggttccctttaagtctgccattgtaatgtttttatcaatcacttggccttccatttgatagaattgatgcgaatgcgttgcatcatctgtatcacggcggtaaacacggccgggactaatcatcttaatgggaccattagcaaagtcatggttttccaagtcacgtgcttcattgggtgacatgtgcgtgcgcatcaataaatcattagtaatatagaacgtatcttgcatatcacgggctggatgattagctggcatgtttaacatttcaaagttatgtttttcatcttccacttcatagccagcaacgacttgataacccattccgataaataaatcttctaaatcatcaatcacttgagttaagacatgcggggtcccttttttgaccggttggccaggtaatgtaacatctaatgtttcgtgagccagttgggctgctgccttcttggcttctaattctgccttccgggtttcgattgcttctgccaaatcactcttgatttcattagcaaatgcccccaccttaggtcgttcttcattacttaaatcacgcatgccgcgtaaaacttctgtaatcggtccttttttaccgagcacttccactcgaatttgatttaacgcctctaaatcaacaactctttgaatttcttgcagactcttttgctgtaagttttctaattgttccttcaatgacattgcaattcctccttatttttttcaacaaaaaaagcccgtccctcaaaaagggacgaagcttcgcggtaccaccctagtttacgaccattccagtcatacactcaagtttgcgctaacgggcaataccggaccaatggtcaactcagaaagtgaacttcacctaaacttagttgaataacttgcagtcaactgattattctccctgaaaactaatgattaggttactctttttcgtctttgtttaataattgtattttaacgtaaataaccgcaattagcaactaggcttctgtcgcataccagtcgtttgaccaatcgtgaatagcagccattactggcgctaattcttcacctttagtggtcaatcgatattcaatcaacgcagaatcatcactggtaatccgcgcaacaatgccttcttgttctagttccttcaatcgttcaaccaatacgcgatcactgcacttaggcacactgtgcactaagtttttaaaccgttgtgccccgttttctaataggacatcgataatcaggccgttccacttcttacctagaattgaaaaagtcttttcaaatttaggacacagttggaaggcctcttgacagtcagcatttgcgttttcttttacaatcaccattattttcacctcacacttattaataagaagtgtactgaaaaaggctgcaaaaagcaacctatcagcttgaagcatctttacttgttaattgccggtgtttggcggagaactttttgtttaaatttcgtccacattggtgtacaaaattccgtcacagcacaataatcatcgactatcgatacaatgtaactttccttatatttcggacgactaacagttgcgccccacatgtgtttaacgatgatgtctttttctttaggtgagagttctgttaatttttcggcattccgaagcgcaatgcgcggatggatataagcatgtgtgcctaaatcgaacttcgtatcacgccagtcataatagaataaatcatgtaataagcccgcgcgtgcaattgctcgcgtatcaagatgccacttcttggcaagttcataactgcgataagagacgcttagcgaatgttccaaacgatctgaatgatgatgttgcgtatagttcgctaatttttggacttcatctttagctaataaatcggcaattagagccatgtaatccgcgtcatcgtaccattttgctgttgaattcattcaaagactcctgacattttttaaattcaaattctgccacaaggataacagcttttcgttcaaaaaagaagttaaacgccttaaaaagttacgtttgttagaaaaaattaagaattaagcttcaatcaacttgaacattaaaatcccagctgcgactgccacgtttaatgattcagcattccctggaattgggatgtaaatattttgcgttgtggctgctaagacgttttcattcacgccgttcccttcattacctagaatcaaggccatgtcatttgctttaggcacatcttgataactgatggcctctggatttaattccgttccataaactgggacgtcttgcgaattgaatttcttcatccagtccatcaagttaccttgataaattggtaaatggaagtgactgccttgcattgaccgcaagagttttggattatacaagtcaacactgccattacctaaaacaacgccggcaaagtctgctgcgtcggctgtccgaatcattgtgccgatattaccaggatcttgaacagcatctaataataagtaacgacccgttaatttttctggcaccggtgtttcagacatttcaacaacggcaaaaatgccttggggtgctttagtttcactcaagtgttgcgccacttctggtgcaatttcaaaagtttcatcgtaaagaccgcgcaatgcgcgttcgtccacatatttttcagtggcgaaaacttggcggatgacggccttattttggattgcttcttggactaaatgccagccctctagtagatacgtattttctttacgttggtttttcttaacggttaatttcttagccgccttaattttagtgttttgattcgattgaatgtattccatgttgtgctccagtctatttagtactttctattatacgcgacttagtgggtaaattctatcaagggtcgctttttaatcgccaaatcgggttgaacagcttacaatgaagaggaggtgatgacaatgcaaaatgcaattcaacttgaagtctatggccgcgtgcaaggcgtcggatttcgctggatgaccaaattggtcgccgataaactccatatcacaggtaccgttgccaatcgtgaagacggctccgttaaaattattgcgatgggcccagcagacgcactcgaaaaatttatcggtgctgtcaaagcttctcccacccctagtgggcgcgtcgaccgtgtcattcaaacaccgctcgaaaatgtgtcagcgtgtcataaattttcggttgtcagttgaaaaacctagccccttcaagtatagttacacttgttgaaacttatcttgaaagggctaaatttatgaaaaattctaaacgcttcgcgacactcgcgatgcttacaatgaccgttacattctttctcgctggctgtgttccacaaaaaatgagcagccatcccaaagtcccaaccggcttaatctatggttcatcctataaatacatcgccgtgccgctccaacatattatggaacgcattgctgatgttttcggtggcatcaatggttacggctgggcaattatcatcatcacattcgttgtgcggatgattttactcccattaatgttgaaccaatcgaataagatgacggcccaacaagaaaagacccgtcgcttgaaaccgcaattagatattatccaagaacaacaaaaagcggcaacaacccctgaagaaaaggctgaacttagccagttgatgatgaaggtttataaggaaaatgattcaagcatgatgccaagtcttggttgtttaaccttattaattcaattaccaatcttctctggtttgtatcaagccatccaatactcacctgaaatttcaagtagccacttctttgggatcggtcttgggagcccaaacattatcattactgtgattgcgaccctcttatatgtcggtcaaagtgcactttcattagtcgggatgcctgctgaacaaaagaaacaaatgcaaacaaccgtcctaatgagtcctgcgattacattcttcatttcgttatttgcaccagccggtttagcactttatttcttagccggtgggattatcatggtgattcaacaattaatcacgacattcatcatcatgcctcgtgttaaaaaacggatcgatcaagaaattaaggaaaaaccaatcgtcacggttgtcacaaaagaaatgttcactcaaaaagcagcagtcaaaccagctgccgacgtcacagaaacaccaacagaaacaagcaacccaactgtcgctacacctaaagtagctggcaaacgcaactcaggtaagcaacggcataagccacaagcttaaccaacaaaaaaaagcggtgcgcctcaatcaattagatgattgaagcgcaccgcttttttaatccgtattaactggttcttctgattttggttctacttcacgaatcagtggtaactcaactctaaaaacagaaccgtagccaacgctactttctagcgacacattcccgtcatagccttcaacgagttgttgggcaattgctaatcccaatccattgccacctttttcccgactccgtgctttgtcaacgcgatagaaccggtgaaagactttcttcttatcttcttccgaaataccttcaccaaagtcttgcacggccacttgcgcataccgctcatcactagcgacggcaatatgaacttctttacgtatcgttgaatatttaatcgcattatccaacagaataatcataatttgttctaagtgatttcgattaacatgcactagcgctggttggtgcaaatcattgtcgagcataaaattaaattctggatataacatctcgaagttatggtaattctgaagaacaacttccccgacatcggtcacttcagtcgttccttcagtcacgactttatctgcccgtgttaaatcaagcatttcttgaattaaatttttcatccgcaagatttcttgtaacgaagccgctaaagattcttccagtatctctggatcatctttcccccatcgattgagcagttgtagatgcccttcaataatcgcaactggtgtccgcaactcatgcgaaacatcactgacgaactggtcttgctgttcgaaataatgctgaattcgattcaacataccattaaacgcactgaccagatcagataattcatcttgactatgcccagtctcaggaattcggacatctgaattaggctctgaattaatggcttctatcgtttttttcataacttcgattggtcgcaagaattggttggctaataaatagccaatcaatgcactaaataacatagcaaaaaagacaaccacaactaacacaattcttaattcagtcatagcgtggttataatcacggacgttattgaccacctctacataaccaattacacggttttgacttgtcttaatcggactaatgccaatcagccgcatcttaccaaaaatagctttgcgctttaatgtatccgtatcgccttttggaaacggaccaatcgccccgcgcgatgcaaacaaacccttcttgtttgcatcataaatcttaactgtaacatcctgttgtgctaaccgcgttaaaaccgcatcttgatagatggctttagggctgtgacggttcggatccaattgattggtgacaaaaccttctgtaagatgtggcccattgctggacaatctcgcttgtacgacggtcaccgtatcgtgcacattatcgacttctctgtgtagcaagatattagagatactactaaagatcacaattgaaaaaatcgcaaaggtgataaaaatggccaacccaaccgcagctgcccatttcacctttaacgatattttacgacccttatttgttgttgatgctaccgtttcgtcctgcatcacgagcgcatcacataacccattccacgaaccgtttgaatgtaactttgttcgccagaacgatcaattttatttcgtaagtaacggatataaacatcgacaacattggtttcaacatccgaatcgtaaccccaaactttgctgagtaagacatcgcgtgccaaaacaacgttgacgttttccatcaatgttaataataattcatattcacgtttcgttagttcaatcacatcatcaccacgccgaacaactcggttttctttttcaaccgttaaatcacggtaagtaaccgtcgtttgtttagcagcgttatgttcgccttcgatatcaattcgccgtagcaatgcccgtaaacgcgctaataattcttcaatggcaaaaggcttaacgatataatcgtctgcgccatgatctaacccagaaacacggtcaatcactgaatcacgagccgtcatcataatgattggcgtattcttaacttggcggacccgacggcagacttctaacccgtttaattcaggtaacatcaagtctaataaaatcgcgtcccattcttcattcaaggcagcttctaaaccagtacgcccattgaaatggacctctgtctcataaccctcatgctttaattcaagttccacaaatcgagctaaatttttctcatcttcaataatcaatatgcgactcatttagtcactccccaaaaaagaatttttaatggactctctaaattctaatcaatgataagaattctctaagaaacctcaagcgccaaaatcggcttacctttccattttagcatagttccaattaaataactaactaatctgactctcatctgatggcgatttagtaataatcgaaaaaacacctgcgccttaataatcggctcgggtgtttagagaaacgtgcttcctcgaactgtcttttccggttaaccgtaaaatgatgcttatggctaagaaccgccataagcatcatttttctgttaatccttaaagccaaaaacgttcgactcatcactctattttaaaacgcacatcccgtcgcagccatttccgcttaatctaaaattgccattaatcctaaaaccgggattaatggcaattttttattaatgctcaatgactaaatgcaatagtcagcactcttgtactaaaacgtgctccagtagacatccgcttccggttagttacataccgcaaacgatcggtttcaccgctcatttacgatattccactaatcctcagcgcatccccgtctacttgcgcactctattgttctttataccaagtataatggaatgtgccttcgcggtctgttctttggtatgtgtgcgccccaaagtagtcgcgttgtgcttggattaagtttgctggtaatacttctgaacgatatgaatcaaaatatgtgatagcagctgagaaaccaggtgctggcacaccttgttggatggccattgcagctacgtcacgaacagcgccttgataattctttgtaatatctaagaagtaatcatccaacaataagttgtttaaatcagcttttttatcaaaggcatccgtaatcttttgtaagaaacgggcccgaatgatacagccttcacgccagatcttagcgatttcgccatagtttaatgaccagtcatattgatctgaagcaacccgcatttgttcaaagccttgcgcatagctcatgatcttgctgaagtacaatgcttggcgaatcttttcgattaattcttttttatcttctgttaatttagcaacggttggggctggtaaaatcttgcttgcagccacccgttcgtctttcattgctgaaatataacgtgcataaacagattctgtaatcaatgattgtggcacacccaattcaagggcgctttgtgaactccacttaccagttcctttgttaccagcagcatctaagatgacgtcgacaattggtttatccgtttctaaatcatcttttcgcgttaagatgtctgctgtgatttccattaaataactgtctaattcgccgtggttccattctttgaagacatcagcgatttcttcaacagataaaccaacaacgtttctcaataaattataactttctgagatgagttccatatcaccatattcgatcccgttgtggaccatcttaacatagtgaccagcaccgtttggcccgatgtatgtgacacatggttggccatcttcagcctttgctgacatttgttctaagattggtgcaactaattcataagcttctttttgaccgcctggcatcattgaagggccttctaatgcgcctaattcaccaccagaaacacccattccgataaagttaatgcctgacttatctagttcagcattccgacgaattgtatcgccaaagaaggtgttcccgccatcgattaaaatatcacctttatctaataaaggtaacaattcgttgatgacagcatctgtaccagcgccggctttaaccattaagatgattcgccgtggtttttctaatgattgaacaaattcttcaattatatagcttggtaccaatttcttttcgctgtgatcttgcatcactgcttctgtcttagcacctgttcggttataaatcgcaacggtgtaaccgcgactttcaatgtttaatgctaagttcttgcccataactgccatcccgatgacaccgatttgtggttgactcatgtaaaaggcctcctaaatgatttctaaatttaagcgttgttgactatcaaaacgacaacgcgtctactgtgtttatgttagcagaattacgctttaaataaaagcattttaactgatttggtccggtccatttaacaaattgggtataaaaaaacgccaaacttagtcggcgtcattgttttgttcttctaataattgtttaagcttagcaaattcaggattgggtgccgtttcttcttcagcctgttgcttagcataggcttcttcagaaatgactgaccacgactgtccggctggcatcacatcatcttgttcttcttctggtgttaggatgtgacttggaatgtgcaagagaatgtgatcttcaacagctacctgtagctctagggcttcgccttcgattgggaacaaaatatcttcgtccgtaaatcgtcccaactgctcgtcttctggatcaacgtagatttcagtgaattcaaaatccattggcaaggctactggatctaaactccgcgttgaaggcactgttaatgtcccgaccacatgtacgcgtgcaattacagcgcgctggtcaaccgttaattcaccgtctactacaaatggtgtagcatctaggacatcagcttctcttttttgtaaactttcttttaacatcaatgtttctttaaacatcaatggatgatcacgatgttttaataatgattggactgtccattttaacaatgctcgtcatcctttctttggttaaaaatcggttggcgggcaaaattctgtgattgccagccaaactgttcttgtaatcgatcaactcgcacctctaaccccagtgggccctcttcggcacccaatttagctgagaccttactgataagtgggtgatcgagcgtttttttcaacgtgtgcaaatgcgcctggccgacttggttaaagccaagcaaatggatgggccgctgcgctaatgattgttcaatatccgtttgttgaatattcaacagaacgtataaacaaacccgttgcaagcgtgcatacgtatatcgctttgttttaagtgcctgtaacaactcggcataccgattgactgaatgaatcacctttttgaaacggtactccaagccctctgacatctgataaatctgccgaagttgggcaaggggtgtactttcaattcggtatttcaatagcggccatagttggtcccaatccagatgcgattgagtctggagcgctgttaaagtcgaatgcggcatcactggggctaactgtgcccagtcatcaccctttgttgccgcctgtcggatagcactggcactagcaaattgtcccgcgccaatcgtttgatcgccgtgttgtgcctgctcacgcttaatcgcaagcaactgcattggcacttcaagttgcgcgttggcaaccgcataactgacccctaagaggtgattgggttgatctaaatttaaatttaattctgcttgataaaactcattgagctgcgtcgcataagttttttgataatcaataaacgtctgtgacttggcctttaaagctaaaatctgttgcccgacttgctgatagtcaaacgttggatattcactgccaaacgctaaggtctgacaaccaagcgccgccaataacttgacggccccatcagcaaaacggtctgcaggttggacagcactggcaaacggcaattcaacgaccatatcagcaccattgctcaaagcaagttgtgcgcgcgtccatttgtccaaaatcgcgggttcacctctttgcacatagttaccgctcatgcagacaatcactaaatctgcgtgcgaagctgcccgcgcctgttgcaattgataccgatgtccattatgtagcggattatattccgcaataatccccgtaattctcatgcgtcctccgcctatttcactgcgctaaagaaccaacgcacactatcttcttgaacggcttcttggccaaaatcagcactgactgatacattcttgaacccagcagcttctaatgctgcaacataatctaccaccggataagttcgttcatggtgtaattcattaagttcttgataaccgtcaatctcgtcatcccagataaaaaagctgagatcatgttcaactgaatgtggtacttcacctgcgtaactcgtccacatgaaggccgtttctgccgtcttatcgttatacataaaacctgggaaaagctcatccatttgataaagtgaatgggcatcaaatagaaattgaccacctggctctaaagttcgataaacttgttcaaaaacttgttggacatgcgctaaatctggcatgtaacagatcgagtcgtcaaaacaagtgaccgcttcaaacgtcccaatttcgcctaagtcaagcatgtcgccttgtaataaaggtaactcgacctcggcttcagaagccttttcagaagcgatactcaacatctcggccgataaatctaagccgacaacctctagccctgcttgttttagcaagatggctaaatcaccagccccacaagctagttctaggactcgatgtttattttgtaacgtctgcaacgtgtaatcccgccattgaccatataatgaatggtccatcaaacggtcatagacggttgcaaagctttggtaaatcattcttcatccaaccattcggaaacatcaacaagtggtgcttgatcccaaagtttttcaaggttgtataaggcacgttcttctggcatgaaggcattgacaacgatatcgccaaagtccatcaagatccaacgtgaaccctttttaccttcgatgtgttttacgaaaacgccattttcttcttctgcgtcttcaatggcgtcaataattgcgcctaattgacgttctgacgtcccagttaacatcacgaagtaatcagctaataaactgatgccttccatgttcattgcgacgatgtcttctgctcgtttgctatcagctgcttgcacagcaatttttaaaatatctaaacttttcactaaagttctcctttatttggcttgagtcggtacccaagcattgtatgtgtcgattgttttcggataaatctgcttcttgccctgaattaaaaaggtcaatgtatttaagatttcataccgcacgccggctgctaaatcagccattgctgtctcacgagcagcttctgcgcccggaaaattgcgcccaggttcgacaaaatccgccacaaataaaatctgatcaatcaaggtcatttctggcgcaccaatcgtatgacgacgcacagcatttaaaatcgtttcatcatggatttctaaatcacgttcaatgaaataagcaccaacaacaccgtgccagatggcattaccgtaattgagtagttctggatcaaagccttgcgttttaatcgcttcaatgaacgtttcatctggtaattgcttagtatagtcatgcactaaaccagcaattgccgcgcgttcaacatctgcgccatttttttgtgctaattgaatcgcggtggcttccacacgcaaacaatgttcaaatcggctttcagataagttagcggcaactttagccactaactcagcccgtgtatacggcacgatgttttcttgataaacaaaatcactcatgatagaggccctctttttgaatgtattcaaagactgggtccggtaacaagtaccgcactgaacagccttgttgaatcttattgcgaatttgcgttgaactgacatcaattaccggtgcgtccacccataagactggatacggcgtttgttgagcataccctgttcgtttaacaccaacaaattggactaactgcactaaatcatcaattcgataccaagtaggcaagtagtcgaccatatcaccgccaatgatgaaataataatcgatttcagggtgttgttgttttaatgccacgatcgtatcgtaggtgtaactgacaccgccacgttcaatctccgttaaatcgagttcaaaatgcgaattgtcagcgatggcacgttctaccattgcaacacggtgttttgctggtaatgtttttttctcatcaacgtgcggtggattggcatctggcataaacaaaattttatcgagaccgagttggctacgaacttgttctgccatcactaaatgaccgatgtgtggcgggttaaatgtgccccccataatgccgacttgcaagcgatggccatcttctacaaccaacacgtccggttcagtcacatgatttgtctgctttagcgttgcactttgcatctgatcaccgccttattagcgtccgagcttagtaacaatcgttgaaatcttttggtatttttctttccgtgaagctttataaatcaccaatgtgcgtccaattttttgcgcaatttcgatgcgactgtcatgttgttttaagaagttggctaattcatcaacggtcacttctgttgtttgtaacaagttaatcttaacgagttctcgtttttcgatggcctcttcaatttgttcgaaataagtttggcttaagccgtttttgcctagttgaaaaagtggtttagtggtttgcgctaaaccgcgtaagtaatgtttttgtttgcctgttaacacgtgcgatacttccttccctaattaaattaatgctttccgaatcatgactgagacacctttaggcgcatatcccgcaaccacgacattttctggtaacgtaatccagcctaacccagcaaacactaaatcactcttttgctttgttgagaattcataccgttggagttctggaaaatcagctaaatcttctggatgtggtggctgtagcatgtcccctaattgcttagcgtagaattgatctgcattttcaagtttagtccggtgaatgtaaagttcgttgtcaaaataaccgacaaagccatgccgtgcaccttgaatgaaatcaaaacgagctaacccacccaagaacaatgtttgttgttcatttaattggtatacttttggtttaatccgcttttgcggcgcaatcaaccgtaagtctttatcatgtaaataatgcgccatttgttgggcatgcataatccctggtgtatcaatcaatgcatgatcatcttcatacaatggaatatcgatgcgatctaaagtcgttcctgggaattgtgacgtcgtaatcacgtcgctatctaaaatcccagtttgcttgataatgcggttaatcaacgttgatttaccaacgttcgtcaccccaacaacatagacatcgcggcctttacgttcgcgttcaatcacggccaataattcatcaactgaattcccttttttagcactgaccaacatcgtttcaaccggatgtaagccatgttctttcgcttctttttgaatccaattgatcactttatttgggttaagagcagatggtaagatatcaaccttattccccactaaaatcacggggttatcgccgataaaacgatgtaaccctggaattaaactcccgttaaaatcgaagatatcgacgacgttcacgatcaacgcgtcactgtcgccaatttggttcaataaggctaagaaatcatcatcatttaatttgatatcactgatttcgttgtagtgtcgtaatctaaaacaacgttggcaatacaattgacccgtttccaagccttttttaagcgctgaattaggcgtatagccgagtgcttctttgtccgttgtttggatgcgagcgccacagccaatacaaaatagttcttccacagtttgttgtgtttcagtcatttaaatcctcccgccaagttaaatctgcgtgtttttttagtagttgttgcataatatatttttcaaagaatcgattaatcgatgtattccaggcatcactgtcaataatgggtttgaccaatatcgtccggacgccagccacattaccggcatgcatatcggtaatcaattgatcgccgaccatcaccacttcatgtcgcgaaaggccaagctgcttcttcgctttggtaatcccagttgccaatggcttgttcgcccgagcaatgaatggtaattgcaattcactgagcgcgcgttgcacgcgatcatggttgttatttgaaacaaccatcacggtgatttcggcagcttgcatctgtgctaaccaagcttttaactgtggtgtgccatcggggttattccacgcaattaacgtattatctaaatccgttaaaacggccttaatcccttttgccttaagttgttctggtgttaagtcgtagatggcattgaccatccaagttggcttgaaattctttagcatgtactgtcccctcgactttaatgtgctttcatcaacagcttcttgcgctttgctacacttatcaaatcggcgcttgcagcgccaattcgctaagttaggcaaatgctcggaagctaaccgtggatgacgcacttcttttctttaacgtgcttttcaaaccatattcctgtgcctagcgacacaagtcaaacgattgcttgcagcaaccattcgccttgttaggctagtgctcggagtataccaggtttgaacgcacttcttttctaacgtgcctcagtaggcatatttctgcggctagcgacgtccgtcaaacgaccaacaagttggtcattcgccagactaggctagtcctcgaaatataaccgcctactgacgcacttctttttaatctagtcactgattaattatagggtatttgacaccaaattgcacctttacgcggttaatttccataatttccaactaattcctaatccatttaaatccataagtcaaactaatcgacttttagccccaactctggtacgtttaaagaaattgagaggatgtgtttgttatggaaaaattcggttttaatcactttggcggccctgacgttttcgaacgtttcgatcagcctcaaccaactccaaaggacaaccaagtcctcattaaagtgctcgctgctggattgaatccatacgatgttgcactacggaatggttcacaagattcagtgcgcccattacccttcccaatctttcctggtacagatgtggttggtgaaatcgttgaacttggtgctgacgtcgatgattaccgcgttggcgaaatcgtcatcaatcaccgatcaatgggtgcttatagcgaatacgtaacggctagtactgcgaagattctccgtaagccagccagcatgagtatcgctgaagcagccggtttacccagtgccggcatcactgcttacaatacgctgatgcacttcacaaactttaaacacggcgatacaatcgctattatgggtgccagtggtgccgttggtagtttactcgttcaattaagcttagcagctcatttaaacgtgattgcaattgccaatagtgctaacctagactatctgcgctcattcggtgtccaagaagtaattgcttatgatcagccatctgacttcgaacgacttgcgcagaccgctaaaatcggtatcaacttaagtcgcgatccagaatcaactgaacgcctcaataacttagttgcaccaggtggcacattcacttcaacgaccatcttaccaacagacgatcaacaacgcgctgacatcaattaccaatctgtctatccgcgtaaggattatgcagatttaaccgccttacaagatttaaatgaattgatcgatcaaggtttactacacaataccgtcttcaagacgctcccatttactttggaaggcattattgaaggtcacaagctccttgagagtcatcatgccccaggtaagattgttattagccactaattttataatgataaaagaaagagtctagaacaaaacgaagttttgtcccagactctttttttgatctttaattatttgtttaatgcagctttagcagcttcaacaactgatgtaaatgcagcagcatcgttaacagctaagtcagctaacatcttacggttcatgtcgatttcagcgactcttaaaccgtgcattaattggctgtatgagatgttgttcatacgagcagcagcattgatacgagcaatccataacttacggaagtcacgtttacgttgacgacgatcacggaatgcataacggtatgaaaccattacttgagtatttgctgatttgaataataaatgtttagcgccgcgataacccttggctaattttaaaatctttttacgacgtttgcgcgtcactgttccacctttaacacgtggcataagaatttcctccttgaataacaaacaacgtcaaagcgttgctgtactgatctaatttttgcttgaatccgaaaatgctatggcttatttaaggcctgataacatttgacggatacgtctcatatcgctatttgaaaccattccagattttcttaattgacgacgttgtttcttagtcttgccgtggaaacggtgacttgtgtaggcgtggctgcgttttaggccgccattacctgtacgtttaaaacgttttgctgaagcacggtgtgtcttaaattttggcatgatatttcctcctaataaatcagaaacagattttttatttttggtcctttagcggttctaacattaagaacatgctacggccatccattttaggacgtgctgtaactttagcgatgtcctctgtttctttagcaagtctttccaatacacgttgcccaatttctttatgcgtaattgcgcgccccttgaaacgaatagaagctttcactttatcgcctttgccaaggaacttacgtgcattgttcaacttagtattaaaatcattttgttcaattgtgggactaagacgaacctctttgaggttaatggttttctgcttcttacgagcgtcacgttgtttcttttgaagctcgaaacggtacttaccatagtccataatacgagcaacgggtggttttgcgtttggtgaaaccaaaacaacatccatattagcttgatcagctaatgcaattgcatcttgagtactcttaataccaagttgttcgccatcttgagcaatcaaacgcaattctcgtgcacgaataccatcgttaaccatcaaatcttttgctatgactcttcacctccataaagtttagagagaaaatgcagctaagtaataaaaaaagcggccctctcataacagaaaggcccgcttgttcggttacttagttcgtccgaattagaaactatcagcccagagacatcaagtgtctactaaggcgagaagcgggaacttctgctttatttctcaacgaaaataagtatactcggttaggaatttaaagtcaaggaaatcccgcatttaaatttacgtgtacttagttgccgtaatgattatccactaagtgcgtggcttttacttcgtcaatgttgtgtgtaccagctaattgcatgactaattctaattctttttgcaagtagttaaagacactttgtaccccttgtgcaccgccaagtgctaatccgtaaatgactgggcgcccgattgcaacgatgtctgccccttcagccaatgctttaaagacgtgttgaccacgacgcacaccactatcaaagacgattggtacccgtttattaactgccttagcaacgacgtgtaatgaatcaaaggctgcagggccaccgtctaattgacgaccaccgtggttggatacccaaattcctttagcaccggcttgaagtgcaatttcaacgtcttctgctgtttgaatccctttaacaaagactggtaaatgtgtgtattcagaaatgaattcaacatctttagggttcaaacgttgtttagctgatttgtagacggcatccattgtttggcccacacctgtttggtaagcttcaacgattggtaacccgactgggaatgtaaaatgattgcgtttatcggtttcgcggttaccaccaactgtggcatcagctgttaagacaatcgctttaacgttatgcgccatcgcttcatctaaaatcttacgattgatatcgttgtccttactcatatagagttggaaccattgcggtgcgccatctgctgcggttgccatatcatcgatacttgctgacgcaaatgaactcatggttaagattgaaccgtaatcagccacacctttagcggttgccgcttcccctttagtattcactaacttatgagctgcaacaggtgccataatgattggtgatgttaagtgatcgccaaagatttcggtagttgtatctggattttcgatatcttgtaaaacccgtggtgcgatgtatttgtgattaaatgccgtaatattttcgttaatggtataaagatcacccgcgccactgtaaatatacccaaagccacccttgggaacaacttcgccggcttctttttccaagtcatagaggttaataatgtccaatggttgctctgctgaacctgcttgatatttttctgtcgtcataataacgcctcccattaatcaacgattggaatcgtttacatatttattataccgcttttttagttgtgcgcaattaaaaaaacaaaaaaacgtccgaaatgtcaaaataacatttcggacgttttaataaccgcttataggttgattgttttgtgatctttaccatcgcgactgtagttaccaacttcagcaacgattgcatctacaaacatatctgaggcttcttcagcagcgttttcttcaccgtatttacggacagaaaccgttgcgtcagcaacttcttgatccccaacaactaatgtataaggaatcttgcttgtttgggcttcacgaatcttataacccatcttttcattacgatcatcaatgcgcacacgtaaaccatgtttaatcatcgcatctttgacgttctttgcataatcataatgtaattcattcttaacgggaataatcacagcttgagttggtgctaaccatgttgggaaagcgcccttgtagatttctgttaagtaagctgtgaaacgttccatcgttgatactaaaccacggtgaatcataactggacggtgcatttcgccatcttcgccaacatattgtaattcaaaccgttctggtaacatgaagtctaattggattgttgaaagtgtttcttcattgcccatagctgtcttcgtttgaacatccaacttaggaccgtagaaagcagcttcgccttcagcttcaacgtaatctaaaccaagatcatccatagcaccttttaacatcgtttgtgctttgttccacatttcatcatcagcatagtacttttcggtattagcaggatcgcggtagctcaaacggaatgtataatcgttgatattgaagtctgagtacacttcaatcattaatttcaaaattgacttgaattcatcttgaatttggtcaggacgaacgaatgtatgtccatcatttaaagtcatttcacgcacccgttgtaaccctgaaagcgcacctgatttttcatagcggtgcatcatccctagttcagctaaccgaattggtaattcacgatatgaacgtgggtggtgtttgtaaacttggatatgtgatgggcagttcattgggcgtaattcaagcatttcgccatcgcccatatccattggtgggaacatgtcctcacggtagtgatcccagtgacctgattgtttgtacaaatctaagttcgctagaattggtgtgtaaacatgttcataaccattggcaacttctttatcaatgatgtaccgttcgattgaacgtcggatggtagcaccatttggcaaccaataaggcaagcccgcaccaaccttaggatcaacaaagaataagtctaattggttcccaatcacacggtgatcacgttctttagcttcttgacgacgctgtaagtcagcatctaagtcagcttgtttgttgtaagctgttccgtaaatccgttgtaacatcttattacttgatttaccttgccaataagcgccggcaaccgataagagttcaaagaccttaacgtcgctcactttagctagcattggtgctaacccaaaatcagcaaaatcgcctaatttgtaaactaagacttggtctgtttccatttcatctaataatgctaatttgtaagtttgcccggcaaatagtgttttagcagcagctttgtctaagctgacacgttcgattgccccgccagcttggattaacttgctcattgcttttttaatgtctggtaagtcggtcacagctacttgaccagcttcgttttcggtatcatagaagaagccatcttcagttgcatgtacttcgccgaattgcatctcgggataagcacggttcaacgttgcagctaaaacaaaggctgccgtattccaaattgccatcaaatcggttgctttgtcgtctttagtgatgatttcaattgccccatcttctaaaattggttgctgtaaatcaactaattcaccgttcaatttaccggcaattgcctttttagctaagcttgtactaattgatttagcaacatctaaaagacttgttgcttgttcaaatgccttttgggcaccatctggaaaagttaattgaatctctgccattactattcactccttctaatttgtcatcaacaataaaaaaagtccctgagacgcacgaattgtgcagctcagggacgaattaatttcgcggttccacccagattgagaccccaacatttggttctccaactttaagcgtctataacggaaacgacccgatcagttgtattgcctttgaaagtggtcaattaaatgggggtgaaaaactttcagctatgtttttctctctgcgatggttcatttaaaaggtgtctttcatcattgattgattctattaaaacacttaattgcttttttagcaagcctaaattactaaggttgtaagcggcgattttgaccaccaacttcaatttcttgcgctaaatagcgcacacgttgcatgatgcgggccgctttaaccggttcgtctccttggttgctagttgtcaaatgcgtctctaattcagtcattgtgaagtttgaactgaagaaggtggcgagttgttcttgcattcgatattgcaaaataatgccaagtacttcatcccgaacccacgcactcattgcatcagcaccgatatcatcaatcatcagaatcggtgctttttttatcacgttgaccttttctaacacattgttttgcccaattgcattcttcatctccactgcaaatgtcgggaaatgaatcaacgtggtttcaaacccggataacgccagttcgttggcaatcgcacctaacaagtaagtcttgccaaccccgaattgcccgctaaggtacaaggcttggtgaaaatcatggggtgcttgccgataagccccgataaacgcggtagctttgatcaatgcgtcaaaccgattggttggatcgtatgaatcaatcttggcctgttcaatatcgcgcggcatattaattgacttcactcgtgcatgcaaggcagcttgttcgcgctcttgtaataaacttaccgtaggctcataactgacatcgataaaatggttatttaagactaactttggcgcataacccggtgccaaagtggtttgcccattagctaacttcttcttttcgatgacgtattcgtaaattttagcggcactacgcgtgaccgtttcttgtgataagcggtctttgttagcttgtataaatgcttggacatcggaatcgttcaaggcatcttcgaccaatttattaaactgttggtttaacttttgccgattcatgtaatccgtcaaatctttacccatattttccattacgattcccgcccctcacgaatttttttcaacgccgcttctagttcatgctgatgctcaggtgtggttgtttcttttggcgcttgataatctggtttagcccatttaggtactggttcttttttagttttgttctgataacgcgtttggcgattgttttgcacctttgccgtctgtttggtttggaaatcgcgaatctgcaaaatcgcatccgctgccgtcttaaccccttgttgagcccactggttcgcaatccgatcgactagcgcctgagtgagcccatcatattgcgtaatgatataaacgaccaaaatattgagcacatcattgttaaagatatagcggttttgcaagtcctttaacgcccggatttcatttttagcgacaaagccgtggttcttttgtttcaagtattcgagataatcaactggcaagtagccctgactttctgttagccactgcaattcctgttcgttaaagccggctttttgccattctttttgtaactcggctaacggtttttgcgttgttgtagcagctggcgtttgccggttactctgacgtcgtgtgtaattgttcaagacgttctgttcgagcgctgccatattaatcgtactgtcagcaacattcatcgtcaagccaatcaaacgcgctaagtccatctcatctagaccatagaaataatggagattaaacaagccctgttcatttttgagaatttgatccgtatcaatctggtattgcgccgttgcatcttgtaataggtcccaatcaaaagtccgcaactcaaccgaggtaaactgcggtgtgctagctgctttttgttgatacattgccttagtttcagccacactgcttggcacgttcgtcaataaatcgttttgcacatggaaaacggtcaagaaattcttagtgacctcttgataatccttggcgtaaaccggtcgtagcttgaaatagtcacggagttccacaaaccgtgtttcgcggaccgcttcgaacaatgccacacttaacaaatcatcgttaaaaaaagcttgtggttgcaatggcgcatacagttcatacaccaacttgcggccagttccctcatttttttgatacgtccgcattaaaccaagtgcttccaatttgctgcggctgtcataaaaagcaggtaaatcaacactcaacagatttaacaaagtcgcatgtgtttgaaaatgttgttccgtttctttcttggtttgactccataacaaaagatagagactgtaagcaacagcccccattaatggttgatataagtaagtgacgactgtttgatcgaaatcggtcaaatagttagcttttgtcactgaaaagccgtcttttggactcaaaaaatcaaatgcatctgacatcggctaacccctcttccttaattcgatttcttcgtcttttctttattcatcatttcttgtaattcactcataaagacattcatatccttgaattcgcgataaacactggcaaagcgaatgtaggcaatctgatcaatatctggtaacaagcgcatcacgtattctccgacggcttgtgaagagacttcgttttcacccaatgagcgaatcttattctcaacttcatcaactacttcagtcatttgctccattgtaacggggcgtttttcagcagcacgaattagcccgcgcaataatttatcacggttgaattcttcgcgcgttccgtttttcttgattaccaacaatggggtttgttccactcgttcgaacgttgtaaaccggaaacgacaattctcacactcacggcgacgacgaatcactcgcccttcatccgtgggacgactatcaattacccgcgaactattctgatgacaatgtggacatagcataatgacaccttcttatcttttgattaattcgtttcaaattcaatccaattttaaaacaattagtataacagtagtataacatgccaggcaagcaggctaaacaaaaaatgtatcagtctcaaggcatttcgccttttccaaacaaaaaagcggtcgaacagaataatctgttcgaccgcttgtattacttgttatgacacaactgttgtaacaacgccaaaacacgttgccgcaacattgcaggtgtgccttgattatcaatcacgaaatccgctcgcgcttttttggtcgccaaatcactttgactatcaattcgcgcatttgcctgttctatagtcaattggttacgcgccatcaaacgttgcaattgtgttttacgttcaacgtagacaactgcaacaccatcgcaatattgctcgtagtgttgttcatataacagtggcacatccaacacaaccagcggtgcatctgctgcttgcatctgttgtttaatggctgtcaaaatagcgggcccagtaatcgcatttaactgagtcaaagcctctgggttaccgaagacttgctggcccaacataggccgatcaacttgaccatttttgacaactgcttcgccaaaggctgcttgcaattgtgcctgtaccgatttattagtcgctaatacctgatgagcaacttgatcagcatcaatcaccgggattccctgttctttaaacaatgccgcaacagtcgacttcccactggcaatgccacccgttaaacctagaaaatacgtcattgaaccgcttctctcttaatctgacaccgcggacagaaatgcgtgccacgctgtgctactttaattttctcaatcggagtctggcaccgatcacacggttgccctttcttaccatagacgtgcaacatatcctgaaaggccccagcgtgacccgccgcgtttaagaacgtattgactgttgtcccaccgttattggttgccagttctaactctgtgatgatttcatcatgcaaacgatctgtttcagctttcgtcaataaattcgccggtgtttctgggtgaatctggctcaaccacaacgtttcgtccacatagatattcccaagacccgttacaattttttgatccagcaacagtggtttaatcgcttttttatgtttctgtaacgcctgatagaaggcggttttcttaaacgttgttggggttggttcaacccctaagtccttcaatccagaaacagtgttttcttgacccgtttcaattaataacattcggccaaacttacgtgaatcaagataacgtaactgttgtccatctgtaaatgtccaaatcacatgcgtgtgcttagtcattggtacggattgatcatcaacttcgtatttgccttccatccgcaaatgactcacaacagttaagttttgatcgaaacgaatcaataaatacttaccgcgtcgatcaacaccgataatttggcgtccaacaagaccttcaacaaaaacatcgtctggattactgataattttcgaccagcgaatctcaattgcttgaaccgtcttaccgaccactaattgttccaatccgcggcgcacattttcaacttctggtaattctggcattgtgtgtccccttatttcttaatatcgtaccaagttggtccaaagccactttcaactttcagaggcaccgctaatgaaaccgcagaatccatgacacttggtactaatttttctaacattggtatttctgattctggtgcttcaaaaatcaattcatcatgtacttgtaaaagcatcttggcttgtaatcctgccttcttcagttccgcttgcatcaagatcattgccatcttaatgatatcagcggcactcccttgaattggggtattcattgccgtgcgttctgcaaatgagcgcaaattgaagtttttagcgtgaatatctggtaaatagcgacgccgatggaagagcgtttcaacgtagccttcttcgcgcgccttcttcacgatatcttgcatgaattgatgaacacctggatactgttcaaaatacgcttcaataaagcgtttagcttcagcccttgtgatcccaatattttgtgataagccatagtcactaatcccgtaaacaatcccgaaattagttgctttcgcttggcgccgcatatctggtgtcacttcatcagcgctcgataagccaaaaatcttcatcgcagtattcgcatggatatcgcggtcttccttgaatgcctcttgcatattggcatcccccgaaatgtgggctaaaactcgtaattcaatttgggagtaatcagaagcaaacatctgccaacccggttgacttgggacaaacgcttggcgaatcttacggccttccgctagacggactggaatattttgtaagttgggatcaaccgatgacaagcgaccagtctgcgttaaggtttgcaagtaacgcgtatgcaccttattatcttgatgaattgacttcaataatccttcgacatacgttgactgaatcttagcgatttggcgataatccaagatggtttggacaattggtgcgtcttttttaagttgttccaagacatccaccgccgttgaatagccggtcttggtcttcttaatcactggtaaccccatcttttcgaatagaatgacgcccagttgcttaggcgaattgatgttaaacgtttcgccagcttccgcataaatcttttcttccaaaatcttcagcgtttgactgaactcgccccccatttgttgtaggcgacttgcatcaactcgaatcccggtgatttccatatccgctaaaactagcgctaatggcaattccatatccgtgaataaatcgaattgttgatgtttttttaattgttctgtcaattgtggtgctaatttgtaaatagctgctgctttttgaatcagatgttgataaagcacggttggatcgacagggactgcgcgtttagcccccttgccataaacagcttcatctgtttggacattttgatactgatgtaaatttgcaaccgttccaagatcattactgttattcgttgtattcaacaaataagacgctaatagtaagtcaaattgaacccccgctaagtgaatccctaagcgattcaccgcaacctgattgcgtttcacgtcaaaaactgctttcggacgtttagcatcttctaaccacgtttttaaaaccgattctgtcaagagtgttacgtcgtcgctgacataccagtggtctggtcggccaatgtaaaagccaatcaagtctgctgtatggtaattgtcggttaacatttcgatgccaaacgcaacgttttcagtggttgtcacgacatcggcgatgttatcaagggttaatactgtaaattgatagtcttcagtagccgtgggttcaactggtgcaacatctaattgatttagaaacgacttgaagttcatttcttggtaaaaagcaaccaaagctgccatatcaggtccgttgtacaccacatcgtctaagccaatcgtaattggcgcgtcacgtttaatggttgccagtgtcttactcgtgaaagctaggtcgcgatcttcaatcaaatgttctttcaatttactctttttcatttcatcgacatgttcatagacaccttcaatgtttccaaattccgtaatcaatttaagcgcagtcttttccccgacctttgtcaccccgggataattatcagaggtatcgcccatcaatccttttaaatcgataatttggcttggttctaaaccgagtttttcttgaacgtgttcaggggtatacgcttcaatttcattgacccctttaacagtgatgttaacggttgtctgactagtcgtcaattgagttaaatcgcgatcaccagtgacgatatcgaccgtgaaaccatcagcttctgcttgtttagcaagtgtaccaatgatatcgtccgcttcgaaattagcgagttcataagactgaataccatatgctgttaagagttctctgatataaggaaattgttccgttaattcaggtggcgtttttgaacggccccctttgtagtcggcaaattgttcggttctaaaagtggttttgcccgcatcaaaagcaactaacacgtgtgttggttcaatctttttcagaataatatccaacatattcttgaaagcataaatcgcattagtgtgcagtcctgcctgattggtgaaatggtctaaagcttggtgcattgcaaaaaaagcacgaaatgcaacactattgccgtcgactaataataattttttttgagaacccatgttgttcctcctacattcgtaaagtgactagctctattctaacaaagaaagtgacgcgcgtcattatgcgcgaccgttgctaatcgcacaaaaaaaagccgcaacaaatggttgcggccttttttaacgtttattttgcttctgggcgatccatgttcattgatgccatgcgaccaaagatttttttgctttggtcgattgttgcgccaacagtatcttggccgatttcattttgtaaatctttgtacaagtctacgtaatagaacaagagatgacgataaacttccaaacccttttccgtcaaatgaacacgacgaatgcgttggtcattttcatcagattgttctgcgataaaagccatcttacgtaatgaacgacattgacgtgaaatcgctgaacgactcacttgcatcttatctgccaatgcactgttagttgtttcattattcgcattttgaatctcgtgcatcactaaaaattggtcgaaagataaaccgtatttttggctttcacgactcattgattcgctaaggttgttaatcaaccaccggtataaacctgcgaattccataaaatctgctgatgtgctaccgagtaaatcggtgttattactcgtatccatttctattcctcctacatgctgaaactttcagtatcaatagttaaccatcgataagtttcatactcacactattcagtacttcaattcttccgtgttctaagatagccgatctaaataatacttagtcagctaatcttaaccgtacttcgatttaaagcaatataaatagtctatagtattaaattatatatttcaactaactttcactaataatcatcaacaacgttcattatgagttgccctgacaacctttattaaaggtaatttattatttattttaccaaaacaatccacgaagtaaaaaatacagcctcaaaaaaggctgtatttaaaattacttaataattgtgattgtaatatgacgacgaccccaactcttacatgccgcaacagttggaaaatgaacatcaataatgtgacctttaatcgcgctacccgtgtcaccagcaattgcatacccgtaaccaggtaccaaaacaagtgagcctaatggaatgacactaggatcaacggcgatacaatttgggtttttagttaaatcaattccagttgcaccaaaatggcttaaaccaggttgggcagttgaataagccgttgcttgcacttgaatcgcttgtccggccttgccatcagtagcgcttgctaaatcggcttgctgagcatttgtgtccacaactggtgcaattggcgcttgtgctgcttcgtcggccgcttttttagctgcttcagccgctttggcttcagcttcttcacgtgcttgttcttctgctttttctttagcaatttttgcaagatccgcttggctttgacttaaattattctttaagccagccacttgttgttccagttcgacagattgttgatccaaactgcttcgttgttcatcaagttctgtcttgctagcttgtaacttatcttgaatggcttgtgtatcacggtaactctgtgctaattcatccatattatggttgtcagcactttgaagaaccgtcaatgtgtaagcccggttgaagaaatcactcaaagaatcagctgacaatagtgcgttgacaacgttgcggtcatcggctgttcgttgaagtgattgcaagcgttccttagcatagcttttacgttttgctaaagtggcttgttgctttttcaaaagcgtttgtgcttgttcgatatttttttcgttatccttaatcttttcctttaaggcattaatttcttgatacttcgcattcacgctcgttaaagtggcttgaatcttcgaatttgtatcatcaatacttttttgggtactgctttcttgggcttgtaattcgctcaaactggcagcactaacagatgtgcccatcgtaaccattgcaactaaacaggtaacaacagctaacgctagttttctaaatcgcatcttgttaaactcctccattcataactcagacttgattatacgcaacaatccccgcaagaagattgcagattaatgacgttatattacagtttgaagacatttataatttttgtgtaataaaaacccacttgtaaccgccgacaaaccaaatacttccaatagaaaaagctaccacaaaagtaaattttgtgatagctttttgactttatacttagattttaattaaaggactaacctttaatccgaactgcgcgggccatttcacgatcttgttcttttcgtttcagtgtttcgcgcttatcgtattcccgtttcccttcaccaacgccgattaaaactttggcaaagccgtgtttcaaataaacccgtaacggcacaatcgtaatccccttattcttcgttaaagcaccaatcttggtaatttccttcttgtgcaacaatagcttccggttgcgcaatgggtcatgattaaactgattgccttgttcataagggctgatatggacattttcgagataggcttctcctttacggacgcgggcgaacccatcacgtaagttgattttgcccttacggaccgatttaatctcggtaccagtgagcactaagcctgcttcgaatgtttccaaaatattataatcgtgaccagcttttttattctgtgcaattaaatttgctggtttttgaggatgtttctttgccattcaatcacctactttttaaaagtacgtttttgtgagtccttgttcgcagctgggcgtcttggatgattgtttttcttttgatcaccacgacgttgaccgcctttttcatgatcacgtgggcgtgctggacgctttggtcgtgcttcaatcttgcttaagatttcagccgaagccaatggcacttcttcaccggctaataattcaaagtccactgagtgggcatctaaatcaacattcgcgaccttgacccgtactggttggccaatgcggaacatcttatgcgttctttcaccgacaagggctaattggctttcaacaaagctatagtagtcatctttcatctgtgagatgtggacgaggccttcaaccgtgcttggtaatgcgataaacatcccaaagctggtaacagaactaatgacagcgtcgtattcattaccgaccttatcaagcatgtattcagccttcttaagatcaacgacttcccgttcagtatcgattgagcgacgttcttcaagggatgtttgttctgcgattggttgtaacttaggtgcccatttttctttttcttcaatcgtcatcccatttgtggcataactatgaatcaaacgatgaaccatcaaatcagggtaacgacggattggagacgtgaaatgcgtgtagaattccgcacccaaaccaaagtgaccaagggattcatcagaataatgtgcttgttgcatacttcttaataacatcgttgtaataatcggttgttcaggttgaccttcaatttgcgtcaagacttcttggagcatcattggcgtcactttcttacttgaaccgtgtgcttgaatcccataagccgtgataaattcaaagaaattcttcatcttatcagcatctggtgtttcatgaatccggtataagaaaggtgcattagcagtactgtaatgttctgcaaccgtttcattagcagccaacataaatgattcaatcatgcgttctgaaagaccgcgttggcgtaattcgatgtcgatggccttgccattttcatcaacgataatcttagcttcgtcttcttcgaaatcaattgcaccacggttatgacgcttcttcaagagaatttcatgtaattctgacatcatttcaaacattggcacgagccgttcgtattgcgcccgtaagtcagcatcttgatctgttaagatcttattgacgtttttgtatgtcatccgcgctgttgacttaatcacacttgggaaaatcttgtgatccactaccacgccgtgttcattgatttccatttcacacgttaaagcgaggcgttcaacgtctggatttaatgagcaaatcccgtttgataagcggaatggcaacattggaatcacgcgatcagttaaataagtactagtcccacgttctaaggcttcaacgtctaatggtgaaccttcagtgacgtagtaactcacgtcagcaatgtggacccctaagtagtagttgccgtttgccaactttttaacgttaactgcatcatcaaaatctttagaatcgtcgccgtcaattgtcacaacgtcttgatccgttaaatctttacgacctagtttatcagattctaaaaccgtatctggaatcgcttctgattgaagccgaacttcttctgggaagtccgtcttaatatcatgttgatacacgattgataaaacgtcaacgccgggatcattcttgttaccaagtacttgtttggcaatccccagcatttgacctggcgcctcaacacttgggtaaccggtaacgtcaacttggaccatgtcacccttttgtggatgtaacccattatccgttaaataaattcggtaattacttaattttttagcatgactttggatgtatccaatccagcctgttttttctttttggatatctgaataaggcatgaattcgccgacgatttcttcaatcccccgcgtaatcactttcgccacttttccttcaggaccgcggcggctgttttcttcggcttctttaatgatggccacttcaaccgtgtcaccattcatcgcaaaattcgtattgggtggggcgataaagatatctggatcattaggttccttatcaacgattgaaacgaagccaaagccacgatcgttagcatggaagaccccttcaacaaggcggttgctagctggtaatctgaacttaccggcatcgtccatattcaatgtcttatctccttctaattctgctaatactttcactaggtctttgaacccttgtgaaccggcaacgccgattcgttcactaatttcggatacgtttaattgttgcgttgcatctgcttcaaaaattgcaagaatcgctgctttcatctgttcaacttgtgtcacatcaacacctctttctcatttcttaaaacggtttataaattctaggacatctgtttctaattggtgatgcgcactatcgaccgtaatgacgtggccggcttgtggataccaatgataatcaactgttatgttttgttgcgttaattgctggtgtaagacttgggcttgtgttggattaataacttgatcttgtccgccttgaccgatgaagaccggtttatctccgatttgcttcaagtcagccacaacttgtcgactgaaaatgccaattgatgcaagttgttgtggtaattgctgattaatagtcgccaaacgtgctgtctgttgcgcagccgggacgcccattaactgcatgattcgattagcatattggccaaagagcggcgtcaatttagcagtcggtccttcgagtactggcgcactaaaaatcccaccaccacaaacttgtggtagttcttctaatgcccgcatggcaaacaatccgcctaatgacaatccgaaaacaaataacggttgtttgttagccgcggataactgctcaatcgcagccaccgtatcggcccaccatgcatcgacagaaccgcgcgttaaaatctcggttggatcagccgttgcatgccctgcaaactgtggtgcactaaccgccagctgatttttctccaaaaagcggcccatcatacggacatcattagcactacctgtataagcatgtaacaacacaaccccgactgaaccaccgtcaaaataaaacggttgcggcaaccgataagacatgcgctcacccccaaagtccttactgcttgaattcatttaaaaaggtctcctgccattcaacaggagaccgcatcaacgttcttattagaattcgacccgtctcacatgtattagtgttatgataagtacactaaagctaatgcaaagacgaagaataaagcccctaaaacaacggttactttctgcatgaaagcttcgaaaccacgggccttttgcttgccaaataaatcaccagaaccacctgataacgcactcaaagcatcctgttgtttacttggttgcatcatgactgcgatcacaatcaagattgaatcgattaataataagttcaggataagattttccaacctaattccctacctttctatctacactgtcttttaatactttagcataaaaagtagttaatcaccacttttttatcgattatttcacgagattctcatccgtatttcgcaaggcttgggcagcgtcttcaatttgccgccgcaccgtcgcccgtagctgatgatccgttaacacaatcaacgtatcaccagcacgaatcaacgtatcaccatgcggaatcagttcggattcgccacgaacaatcgcgattaacaaacatgtctttggccagtccacttcacggacttggcgatcctctaacggtgcgcccgcaaacactggtacctccaagcgatcagagaatgttgctaacttacgatatggtttgccaagtgcgcgttgcaataatgatgcgtaaattggcgcgccccccattaagtcaacgacgatgtaggccaccaacgataaaattgctaatggcatcaagtgcacgagcgaacctaccatctcggtcactagtagaatggccgtaaatggcgccttcccgattccggcaaagtaaccacccatcgcaaaaataattaagttgggaacataaactggtgctaaccaaccaagttgaaccattatgagtccataaagggcaccgattaaagctcctagtgataaaatcggtagaaaaatcccaccaggtaatcctgaaccgtatgaaatcattgaaaaaacaaaccgtaataggaatagaccggctaccacactgattgtcggtaaattttgtccaaggtgtgcaatcaatccattgccaccacccaaaatttcgggccagaaataaccaatcggcaaaacacataataatggcactaatccggtatacgcttttggcagcgggagcttcgcataaagttgtggtaaccacaataataccttctgataaacgtatcccaacagtcctaatacgacaccaagtatcaacaaatgccaatactgattaattggcaaactttgggagtacgtaatatgtaatgtcggtgtcaaaccaaaaaaatttaatgaaatgaagttcgctgcaattgcgctagcaagcgacgtcacccaaactaacggtgaaaagttatggtagatttcttctagtacgaaaaaggtcccggcaattggtgcattaaacgcagccgataagcccgcggcagccccactagcgattaaaatccgacgatcagcaccgcgatttaccaacttagcggcgaccccctgtccaacggcagcccccagctgaatcgatgggccttctcgtcccaagaataagccaggtgcaatacttaaaatgcccccaacaaatttacgccacaggattgaccaccaattgaaatcaaactcaccttccaattgtccttcaacttgtggaatccccgaaccacttatattcggttccttttttaataattgtgccacaagcaggccgatcaataaattggcaccaaccaatggcacccaataccacgggtgtgcatttaacccttgatagatagtgataacaaaggccagtcctttttcaatcgctaagcgaaataaactgaccaccaatccagtgaacgccccaactaataaccctttgcccacaaagcgaaaccgtgtcttattaaactgactagcacgtctaagtcgtccattttccacgtttgcctaacctccatctgataatgctttatatacagactaccacggaaatggggattatcaaatgttgaaaccaaataaaaaggcgagcactattgctcagcctttattgatagatgtctacatcagatattagttaatcacttattaagttaaaactcataagcaacacaatctatcttatcatgtataaacccgaatgtcaacaactttttttaagtaatattcattcaacgttttgctacatgctcatctctcgacgacatagaatatcttaccatcctagtgggacaacgtcaatcactaatttgaaaaaaattcaaaaaaattgaattcctgtataaatatcgaaaaaataattcatatcacccggattctcatccctaatctgcgctattgattatccctcataatacttttaaactgctatttgttccaattttatccaaattggtataggtaaacaaaaagatcctgcaaaattcgcagaatcttcacgtcctaatagaagtcttctaggttttcatagtctaatatcgcaatctttcgaccgtttcgttcaattagcgcatgactttctaactgttttaacttacgcgataaggtttcaggcgttgttccaatatatgttgccagttcttttaacttcatcggaatcatcacttcagtttctccgctcgctttagctaaatcaagtagataagtcacgattctggattcaactgactcgatattgattaagttcgcctgtttttccaaacgcgtcatcttatcagtagttgcttctagtaactttaaactaatttcgggataggctaacagtaactgttgaaaagcactccgcgataacgtacagattgtactatcttgcaagacctcaccgtacaacggctcatcttccgttttaaaaagtaacttttctccttcaaaatcaccgggttccatcatgcgtagcagttgctctttgcctgctgtagagagctgatagaccttaatgctccccttagctaagatcactaaccgcttctgatccatcgggctcatcaccaacgtcccttttttaacgcgttcatgatgggtaactgccgaaatcttgaccaaactatcacggtctaaatgattaaaaatcggtactatctcagcacaaatatgttgttcgtcagtcacctagcccacttccctctatcttaatcgtcgtcttcttcatctaatccttcgcgcgctgcttttcctagttggctttgcaattcacggatttggtgttggttgtagcccattaaagaaaccatatccgccgctaaagcaaatcgttcttctttttccgcaagtttaatcgcacgggaaacaaatagattagcagtattatagtccgcaaccatttccgcaatcatcgctggcatctcccagtacttaatccgcggctcttctgtcagcatcccatactcggtatactcagcttgcgtcgtcggaagcacttcaccttcgtctagtagccgttcggccgtcttgtctaatagcatatcattttctgcaagcaatgtggttaattgcgctttaaaagcttggttattgattcctttagcgtaccacttcatttgacggagtttacgccgttgaatcgttaagttagccatcacatggccgatcatggcacccgcggttggtgtatggtgatcaacatcagcttgtttaacttctgcttggtaacgtgtttcgatttcttcattagataacatattaattgccccctatttcactttgatactttgaacgctgtagcccaagtcagttacagcttgtgttaattcatctgggtttgtcacggcttcatcgtattctgctttcactttactagcattaaagagaactttcactgattcaaccccatcttgttgactgacacccgcttgaatcttttgcatacatgacggacatgatagctcgtctaattgcatcaccaattttgccatttcaatgaccaccttttcgtttgattactgttactataccgcgcgctgcatgattaaaaattgaccgccatcaagtttagcgaactttaaaccgaatcaggcgcatcgcattgaaaatcacgaccagaatactaatctcatgaacaaacatcccactagccatctgtacccagccaagcatcaggccaagcaataacaatccgaccgttccaacagcaatcacaatattttgaactgtattacgtgccgtcgccttcgtgaggtaatcggcatacactaattcggataacgtcgattgcattaacacaatatcggatgtctcaatcgcgacatctgtcccagaacccatcgcaattccaatgtcagccagtgcaagcgaaggactatcattaatcccatccccgataaaagccactttttgaccgcttgcttggtaggtcttaatgaattcaaccttctctgccggcaaaagattcgcgtggtattcagtaatcccgacggctttggcaattgctgcggccgtctggtcattatcgcccgtcaacatgactaaatgtttaacgcctgcttttttcaaacgcgttaatgctgccttggcttccggtttaaccgtatcagcaatcccaattaataaaacaacttgttggtcaactgcgactaatacggttgattgccctgctgtttgactggccgtgatcgccgcaatctgcgcaccggttaaccggatccctgcttcagtcatcatcttggcccgcccaatccgaattgtttgaccagcgacttcagcttgtacccccaaccctttgagcgtttcaattcgttcaatagttggtaagtctgtcacccctcgttcccgtgcatactgcacaatcgcagtcgccagtggatgatctgactgtgcttcaaccgcggtagtcactgccaacgttgcttgttctgccgctgtataaaattgcacatgtgcaactgccgtgtcccctttagtcaatgtcccagttttatcaaagaccatcgtatcaatgccagccatcgcattaacgacttcgccgcctttaatcaaaaccccatgcttcgcgccattgccaatccccgccacgattgaaactggcgcaccaattactagcgcacctggacaaccaagcaccagaatcgtaatcgcgagtttaaagtcgcgcgtgattaagccaatcgctaatgccaacactaaaacggccggtgtgtaatacgtcgcaaaacgatcaatgaatttttccgcgggtgacttactatcttgggcctcttcaaccaattcaataatttgggcaaaagttgtatcatccccaacctgcgttgcggtaaccgtcaatgtcccgttatccacaattgccccggaataaacagcatcacccactattttcttaacgagttgtgcttcgccagtgatgctagcttcattgacataggcactaccttggacgacttgcccatcaaccggcacctgagcgccagctttaaccaatacttgatcatcgatttcgacatcatcaacacccaccgtcgtagtagtgccatcggccgctaacacttgtgccgtttgtggcgccatttcagacaatgcgcgaattgattctcgtgtctttttcaaggttcgttgttcaagatagctcccgaataaaaagaggaacgtgacaatcgccgattcattgaactcaccaatgattagcgctcccaataccgcaatcgtgaccagcaaatcgatgctgacgactttcacttttagcgcttgatacgcctgcatcaaaatcggtgcaacccccatcattgacgcaaccaataacagcccttgcatcacaattaccgccccaccaagccaataccagccataggccactgcaatcaatccgccaacagtcagcgcaatctgattcttcacggattgtaaccatctttgaaatttcatttaaaatcccttcttcctaacgattgtctttagtatagaagaaagccgattttaagaacttgatggttatcaagtttacccgaatataacagacaaaaaagcacaatcaacgattgtttcgtcgattgtgctttttcaattcgattaggcttcaaacccattttgatcagcgacttgcttgaaccaatgacctgattttttaatcgtccgttggcaatcatggtctaagtccaccgcaataaaaccgtagcggttcttataggcgttggtccatgaccagttatccatacacgtccacatatgataaccgagacagctactcccttcttggagggcttgatggacatacttcaaatgatcctgtacaaattcaatccggtagtcatcatcaatctggccatcggcattgcgataacgttcttcgccttcaacgcccatcccgttttccgaaatgaagcaagcaatgttgccgtaattttcgcggacgttctttaaaatatcgtaaatcccacgttcgtagatttcccacccgcgatacggattgactttcttacccggcatatcgtaattgtcgaaaaaatcatccggcatcgggccgtttgtatggtcgattggggtttccttggccttcacgcgccgtggttgataataattaatccccaataaatccacagtattcgccttaatcactgccaagtcagctggttgatagtcgggtaagatggctagatcttttaaaatcgcgaccaaatcagcggggaattcccccttcacggcaggatctaagaatgaacggttgaaaaaagcatctgcaatttgtgcggctttcacatctgccggattagtcgcatcccggggataacttggggttaagttaaggataatgccaatttgccccccttgattgcgtgcgtgatatttttgaatcgccatcgcactcgctaatgtttcgtgataaccaacttgtaccgcatgcgctaaattaatttcagctggataatggaactgatataaatagccgccttcaaccggcacaatcggttcattgtgtgtgaaccatttcttcacccgatccccgaataattcaaaacaggtttcagcataatgaacgtaagcatcaaccgtctcacgattgagccaaccaccttttttctggagtgctagcggcatatcaaaatggtataaattcataaacggttcgatgccgtttgcgattaattcgtcgatgtacgcattataaaaatcgacagcttgtagattaatctcccccgtaccttgtggaaacaaccgactccattgaatcgatgtccgaaaactattgtgtcctgtttgtttcatcaattggatatcacttttgaattgttgatacacatcagaggtccgcgctgggcccacttggttaaaaaacttttctggcgcttgttgataccaataatcccaaatattatcgcccttaccatcaccgtcaatccggccttctgtttggggaccacttgctgctgaaccccaccaaaaatcctttggaaagtcataaaaagtcatcgctagcactccttcttgtttgaatagcctcagtatatcagcttctttttaaaaaaccaactcttttatttaaatgtctagacttttcaaaaagagcgtgctatattgagaatgtaatcgattgcaaacacatgtaaaggacggtgctctacgtgaatacttttatggacacgcttagcaagaaaatcatgcctttcgcaaataagttaggccaaaatcgttacctaactgttctacgagacgcatttatgctttcattcccattgacgatgtttggatcaatcatcgtcgttatcactaacctgccatttttcaacgatgccaccaaagcgaccctaacggaactccttggtaatggacaaaatgccacaatgtcaatcatgacggtcttcgtcacattcgggattggttattatctttctaattcatatgatgtggacggaattttcggcggtgctgtttcattcgccagtttcctaatcctcaccccattcatgatgaccaccgataaaggcgttgacgttagcggtgttttaagtctcgatcgacttggcgctaaagggatgttcattgggatgattgcggcatttatcgctgcagaaatttattgccggattactaaaaaaggctggcaaattaagatgccagacggtgtcccacctgcagttgcgaaatcattcgccgctttaattccagctattttaaccttaaccattttcttagtcattcaagcggcagtcactggtttattccatgttaacttgcacgacgtgatctatgaaattattcaaaaaccactcgttggtttaggtggcagtcttcctgcaaccctaatcgcattgttctttgtccaattgctctggttcttcggtcttcacgggcaaattatcgtcaactctgtaatggatccgatctggaacacattaatgctcgaaaacttggaagcttacaaagctggccatgctttaccacatattgtcacgaaaccattcatggaaactttcaccgtaggtctcggtggttctgggatgacattagccgtcgtcttactgatggcctttatcatgaagaaaaaacaataccgcgatgtcggacgtttggccttggcacccgctgtcttcaacgttaacgaacctgtcattttcgggttcccaatcgttttaaacgccacaattttcattccatggctgattgcaccactgattgtcacagcgctcaactacactgtaatggcaatcggattggtgcctgcgccaactggggtttcagtcccatggaccgtcccaatcttcttcagcgggatgctcgcaaccaactcagtactcggcgggatcttacaactcattgacgttgtgctagtcggtctcatctggttcccattcattaaaatgctagatcgccaaaaagatcctctggcaaactaaagattgttttaccccgttgtttccactaaactataagtagaaagcggggtattttttttgccaaaatacgaagaaattgccaacattattcgacaacggattaaacaagggcgctatcctgctaatacgttgttacccaatcaaaccgacttagttcaagaattcgatgctagtcgaatgacgatcaaaaaagcaatcacgattttaacgatggaaggactcgttctatcacgacgcggcgctggtacaaaggtgttagaccactctttttggaataaatcaacggcaccagcggatcaataccgtgggatgtcacgcgacttagccgacattggtaaaacactctcaagtaagatcatcacgtttgaggtgactttcccaacgcctgagattaaagagcgcttaatgcttgctgatcaacagcccgtctacaaaatcattcgactgcggattatcgacggcgttaatagcgtcctcgaacatacctacatgccagtgagcctagttcccggattaaccgatgatgttctcgcacagtcaatctacacctaccttaaggagaccctacacctcacgttcgcgggtgcctttcgcaatattcaagccgataaggccgatgaatatgaccagcaatatctggactgcgccccaactgatcccgtcttagaagttgagcaagttgtttatctcgataatggccaaccgattgaatactcaagaagccgcaaccgttatgatcgccgcggttatacattcttagacgttaagaatacttaattgcactaaaaaaagcctgccagcatttagctgacaggctttttctagtgattatttttcgacatcttgtaatttttggttgtcgtctaattgtgagcgaccaccgttgccgattttttgtaaatgattcattcctaaccataatagcaagagtgctacgacgatgaaggctaagagaacaaagaatgattgaacaatttgaccggtacctaaaccagatgtaattgcttctctgagccctagaattgaatacgtcattggtaagaatgggtgaatgacgttgtagaagtggttcgtgatttccattgggaatgtaccacctgaaccccctaattgaagcatcaagaggaccattgctaagaaacgaccaggattatcaaatgtcattgataagaacataatgatcgacatcgaagcaagtgagaaggtaattgccattaggaagaattgtgctggatgatcgacgtttaatccagcaaccatcattaaggcaggttcgataattgccatcccgacagcgactaaagcgccaaccgtgattttacttaagaaccatgctgttgatgattgaccagtcattgagatcttccgaattggataagcaaagttgaagacaattgcgccaacgaacaatgctaatgaaagaacgtaaggtgctaaggcatgaccgtagttaggtacatagctgtaatttgaatgtttcaattcagcaggtgcagcaaacatatcggctgtcttatccgttaattgaattgagttaacttcatttgcaccagatttcaatgcagatgctaatgttttattaccatctgttaattgaccagcaccatctgttaacttagctgagttatccgttaattgatttgtaccagcagctaattgatcaacaccgcttgttaacgttggaatttgaccatttaattgaccaagaccattgttcaaggctgttgaaccagttgccaattgactgataccacttgtcaattgaggtacttgggcatttaaagcaccagtaccggcagcaagtgcagctgaaccagttgctaattggctaacaccgcctgttaaggctggaatttgaccgtttaattggtttgtacctgcgcttacttgtgaaacaccaacagtgtaagcatttaatcctggaattaagcccatttgacttggtgtaccaacaaggcctaatttcatttgacgtaaaccagcattaattgttgcagttgcttgaatagcacccatagtttcaggtgtgttacctgttctagtcaatccggcactaacagcagccaatccacccgtcaattgattaattgcagaattaacaccatctttaagaactggcgaaactggagcaataccattgattcctcgcttcaactgtgcaagactctgcatcaacgcagtcatctgtgtttgaatcgatttcaaatgtgccttattatcaagtgtatttgccttaattgaattaacgtcagtaccagatgaagctagttgattacccgttgcagcaacacttgcacccgcactttgtaaagcacttgttaatttctgagccaaggctggattactccctaaggctgcttgaatctgtggatctgaaacaacctctgtaattgcttttaattgagcaccagtattggcgacctgactagcagcacttgcacttgaatcttgatcatacagctttgtattcacttgttggagcgaactacctgtacttgcagtatttgtagcaattgatgttaaatcagccgtcacttgattactaatttgatcagttgccggattattgatacctgcatataactgttgaataacatcgttcacctgagtaagtcccgaggttaactggtcaatccctggtgcaccagtttctaattgattatcaatggtttgagcgacatctgttaatgctacattcaatttctggctaccatcaattaattgatcagtcccaccatctaattgactaacaccgttcactaactgactgctactgccattaagtgtatttaagccagtacttagtttcgtaacaccattagatagatctgtcgctttactgttcaacgtttgtaacccagtatttaattgactagccccactatttaattggcttgcgcctgatgcgagtgcacccgtcttactatctaataatagtaagccgttgttaagtgtgtttgagccatcagctaattgtttaacaccatctgataatggcacaacacttgttttcatcgtcatgataccatcgttgacttgagcaacaccggctgtataaacatttaaaccatctgataacgttacagaaccgtctgttaattgtttagcacccttggcagcagtactgaaccctttaccggcagtcttaacctgtttgaacatcactttagcgtaagcatttgtgacagtttcccgaacttgggcgttcaattccttggcacccatttcactgataacttcaccgatgaagttcaatgaatcgttggttttgtattgaatttgcatcttcttaggattcttatccaagactgtagcagcattggcagagaagttcttaggtagggtcactacagtgtagtattccttatctttaagcccctgttgtgctttttttgctgatacgaaacgccaaccaagttggtcgtttttcttcaattcttttaccatatctttaccagcgctcaacgtttcaccgttgtaagtggctggttgatcattattaacgacagcgactggtaattcaccagtgctaccataaggatcccagacagatttaaggaaaaagatactgtacaagaatggaataaacacgattgcgattaacgaaatcatgattaaacgattcttggcaatgaacttaaattcgttttggatcatcttcatgctaaaatctcctttaattatataagttgcttaattgattacattcaatatccacgataactaaattagtctaaccttttttcatttaaatttcaagtcttatgcgccaaactattctctattcacaactgtttctaatctaacaaaaaaagacggtcgttatttatataacaaccgtctcccttatggaagaaacaaatgccttcctattaaattaattattttgcttcaatcttcgtcatgccacccatgtatggtaccaatggttctgggattgtgacgctgccgtcttcgttttgatagttttccaagatggcggcaactgtccggccgactgctaagcctgaaccgttcaatgtgtggaccaagttgacgtggccatcttcgtcacggtaacgaatttgggcgcggcgtgcttggaagtctgtacaatctgaacaacttgagatttcgcggtacgtattttgagctggtaaccaaacttcgatatcgtatgtcttagctgatgtgaagctggcatcgccagttgccaatgtgatgacgtgatatggcaagttcaatgcttttaagatattttcagcatcggcggtcattttttctagttcattgaatgattcttctggtttcgtgaatttcaccatttcaactttgttaaattggtgcatccggattaaaccacgggtatcacggccagcacttcctgcttctgaacggaaagctggtgataaggcagtgaagtagattggcaattgtgcgccatccaagatttcgtcgcggtagaagttcgtcaatggcacttcggcggttggaatcaaagtcatgggttcgccttcgttggtcattgtgtaaacatcttccgtaaacttaggaaattggccagtcccaaacattgattcgccattcactaagtacggcgtgatcatttcttcatagccttctttagcatgttgatccaacatgaagttataaacggcccgttcaagacgtgcaccggcacccttatagtaaacaaagcgactacctgatactttagcggcgcgttcaaagtctaagatgcctaatttttcaccgatatcccagtgtgctaatggttcaaaatcaaattcacggggtgttgaccatttgcgttcttcacggctaaaactttcatctgggccaacgggtgctgaatcatctgggaagttgggtaagcgtactaagatgtagtccactttggccttcacttcagccaattcgctatccaaagccttgatttcggccccaacattcttcatagcagcgatttgttcagtcgcatcttctttattgcgtttggcaacggcgatggcttctgaggcagcattgcgatttttcttcaattcttcggtcttcacaattaaggcacggcgtttttcatctaatgcgatgacctcatcaatttctgcagcttgaacaccgcggctagctaacttatcctttgcccattggacattttctcgaatgactttaatatctaacattgcactctctccttttaatgatctttaattaacaacaataaaaaaagccttctcatcccttaattgggacgaaaagacttcaattcgcggtaccacccaagttcacccactacaaataataggtgccctcaattactgataacggccaggaaccgtgtagttcatcactacccactattgcgctggaatgctggattcaataccttccaccaaccggtatctctctgtcaatccatataggcgcttattcacgtgtttacttcttaatgtaagaataccgcatttaatctttaaattcaatcatcaatagatgatttttgaatccatagaccccgtaataaaccgagcatacgtccaaaatgatcgctatctgcattttgatgccatttaaacatcaccgcttctgggttaacgatgccagttaaatcaatgatcgaagtcgtaaccaccatatcagcatccattaaatccgcgtcagattgactaacatccgcatacaaaacactattcagtgcagtcatcaaatcaaagtacccgaggaaggattgttccgtcacaacgacaaccttcactttattcatcggtgcaaaccgttgaatcatctgacgcaagacgttgtagtaaccactgaccaattcttcacgtaatttgactaagaatgacactttcggattgattaataagtaatccaccgtatcatcaatattttgttttaggacatcatttggcttgagatattcaacactttccatcatttggtcagcgagcaccgatgtcacatcttgtttaaacatgtacgtggtcatcgtcatcgaaatcatcgtttgcacgaaaccttgataattcgcatcgtctaagtttaggtatttcttgatatcaaatggaatttgatcaataaaagcttctacaaattcgtaaatcactggaatataccgcttgtatcgcgtttcgtaagattccatgtagggattagcatcctgaatctgaatcggtccaaaattaatgatgtcatatatattgaatgattcagccatcgcttcttcttgggtcatttgtgcaagaatgctcttgatccgtaaagcttggtcttcaaagggctattttagatattcagaaaccatattgggaactggataacggataaaatcgccatctagttcagttgaaaccgtgtgaccttgtagtaatcggaaataggttagaacgattgaatacgcccctagttcacgggtcaaaatattggttttttccaattggaaccgatcaatcgcaacatcgaacgccttaagtgcatcgtctcgtttaacatcttcaaagggccaggtatgcccttccgttgccatccagaataacatcgttaagactaaatgaattttattttcgtcgtcttctaaccgaagtggatcataatacatacggatatcaaatgagcgaattaagtcgcgcaccccttttaaatggcgtagcgccgttgccttactcgtatcatgggcttcccagaattcttggaatgtaacggtctcacccttgagtaagattttgataaaatcaaacgcttctgacttattcactaataaatagtgataggcatctgttggaacgctgaacaaggttttaatatcatcaacatccggtccgataatttcctttaggtccccaataatgctcatgtacatattgtacaagctaccgtaactgcgatttaatagcattgctacttgttttagattcacatcttcaacgagcggctgattattacgcgatagttcaatccgctttttaacaggcaactcatcccgttttaaaccaacaatctccattaataaggcgtacttatcattttccgcttgcgttagaaaaatactctcacttgcgttcaaaccgattccccctagtaaaaatccttataattagtaattaatcctaccataaattgtgcaaatagtaactattgcgttgtttaaaatcaaagattgctttttacgtcagaaatgctagaatatttaagtgacgtttggttgtaaaacaccatatgttgtatatcaataataatttaaacacattttatggtcaaaagagggagactgatgacattgctcgtacttgctggcacaattggtgcaggaaaaactagtttaaccaaatatctatctgatcacttaggcactgaagccttttacgaatcagtagacgataatgaagtattaccattattctacaaagatccaactaaatatgcgttcttactacaaatctatttcttaaacaaacgatttgatagtatcaaacaagcatatacagatgataacaacatcttagaccgttcaattttcgaagattcattactcttccacttgaacgctgatcttggtcgcgctaccgcaaccgaagtccgtgtctacgacgaattattagccaacatgatgcaagaattgccatttgctgcccacaagaaacgccctgacttattaatccatgtacgcgttagtttcgaaacaatgctttcacggattcaaaaacgtggtcgttcatacgaacaactagaagccgatccaaccctctacgactattataaagaattaaacagccgttatgatgcttggtatgaagcctatgacgaaagtcccaagatgcaaatcgatggtgacaaattagacttcgttgaaaacgaagctgatcgtcaaaaagtcatcgaaatgattgacgaacgggtgaaagccttaaacgcagaacaagaagcaaatatgggtgcctaattgcacaaaaaaagccgttcgacaaattgtcgaacggcttttttattatgcttgggtacctttttgcatccataattcatgaataatgccatacagccgggcatagtgatcgctactagcctttaagcgccacgtaaaatacaacgcctccggattaacgttttcgggtaaggcaatgctcgacgtccgaacaatcaggtctgcatcccgtaaagcttcatcggtcgtactaacagcgacatatttgatattatcgagtgctgttaagatatccatatagccaatgtaatcttgctcaatcacgagtgcgaccttcacctggcttacaggatgatactgctggatgacttgttgaattaaattatagtaagcctttatcaaattctcccgcccacttgctaaaaaactaaaagctggttcgaataagaggtaatctacggtatcactaatttttttatggagtagttcattgggttttagctgcggcatacgaatgactaattcattaaaaacgacagaggtcgcgtccatcccaaggatataggtcgtcaccgtagtcgttaacaacgcatttttgaaaatatcatatgtgtgctgcgaaatctctaactcatgcataatatcaaatggaatacgctccaaaaaggcagtcacaaaacgatgaatttctggtatataacgttcatctgcccaatcagcagtcaccttagtacttgttattgagcgtaacggcactggacaataccgtaacaagaagaatagtccagcggcttctgaacgcccttccgttaacgttaactctgccaaacaagttcgtaatcccattgattctttagtgaaatcggctgcaagtaaatcactgattaaattaggatagggataccgaatagttgctaatttttcatcgggctgcacgactgcaccggccatcactcgataataagttactgccagaatcgtggcgccaatttcgtgcgttaataggttaggcttttgcaattgaaattcatcacagacatagtcaaaggccgacaaaacacattcgtgattgatttcttcaaatagccattgatgcccaccagacgccaaccagtataaggcggataagaccaatcgaattgtcttctcatcaccttccaaccggattggttcgtatgaaacccgtaagttgaaggcgcgggttagatcgcggacttgctccaaatgacgtaatacagttgctttactactatcatgctctgctaagaaggttttaaacgatatatccccgccccgcaatagaatctgtacgaaatcatagatgtcagaatgttgtactaaatataaatgatagacatcacttggaattgcgaagagtcgcttaacatcatcttcctccgtccctaatattgcctgcagatccccaacaatactgacatacgtattgtataagctactataattacggtctaacaatgttgccacttgcttcaaattgacgtcatcgattagtgcttcgctctttttagccatgctcattcgttttctaatgggtaattcatcccatttgacattaataatatctaagaaaagagcatacttatctttttctgccaatattaaataaacactattggtatccacattgcctaaccccttgttccaaataattgatatatattttaccatcaatcgatattaaagcataaccattctacagcgatatttgttgcgtataacaaaaggcgatgcgttattaacacacaccgcctcaaaagctgaaaataatttcatcatcagctctaattaaacctaacacgctaataacttaaatcaccaattgccatttcaaatcagcattatatgggccaatctgataagcatcattataaggtagtgataactgcaactgactttgtttccaaccaactatggttccataactcgttaaatcttgctcactgattggccgctgtagaatcccatcaacccattgattatcaggcgactcattagttaatgcttttgcatcactatcatttaagcggtatttaaaattttcttgcatataaaagggattattgggtcgttgatttatccccagatagcctagttgtaaatcaaaatgactacacaacggattacatatgactactttcggcgcttttggtgtaccagtatctgccacttttagttgtacacttggtacctcatttagcgcaatcgtccgattagtacccccctactttgacccaaaatttcgtcatcaaacgtaattgttttcggaatgccaacctctactgccccgtttaaagttaatttgaattggaatttagcgattggatttaaatcatcatttgcaataggtgcacttgccgccttttcagacaacgtaaactcaatgtcgcttgtccgcatgacatcacaatgcagcccttgctccgtagtagtcggattccccgtctgattctgactagcattaattagctgtgccataaagctctccgataaatgcaactgcgaatcggttatcaccggttgccacactgcattttgatctgcattaacacgatagtataacccaaaagaatcaggcgggttaactaggtcgacttgtcctgtaattccgtactgcggggccgcatgtagtgtgccatccgcataattaaactgcgcatggccattcgattttacagactgtgcatttttggcacccagatcagctaatgtgacagagagaatctcaggcacctgaatgcctggaaaatcgtggtcctggccaaaaacggctttatcatgattgggtgaaatcggagcatcgggtatgtagattagttcacgaataatactttcaagtcgcgattaaattcagtatactaaatttagataaacaaacttactggaggatagtattcatgcggacttggcaaaaatggactttgattgttctggcactcttcttaataccaattatgtattttgagaaccaatattttatgagagagcagtttaaacagtcgcaaaagaatatgcagcagtcaactttaagtgattttaatgaccaagcaagcggtcaatacgcggcctttaaaatctacgctgcagccaaaccgcatggaaaaatctattattttgtcccacaaaaccaaaatggggccaatatcgatttacaaaaacaagaagtcgcactcggtaatcagctttatgcaaaagcacacaaagaatcacccgacattgaccatatcacattgtacgtcagttatactgctaagaacttgcaagacaatacgtatgcttttaagccaaccgccgaggcttatggttttgtaaaatcacggtttaaaacccgttatcaacgcttgttttcacaaactgggactgaagccatctatgatatgcagcacaatacaacatcggtttcgtttaaagatttgcaaaaagatagcacaacaattccgatgattcgtcaacttgcaattgaccaacaattacaagcccatgattatacccccgaacaacttacacaattggaagcacttgatttcccgggaaatgatcaagcaactaattttgactttacaaccgatggtctaacattgaaattcgcaaagaatcctcttgatattgaaacaattgccctgccaatggcaacggttggtccatacctcaatcccaatcttgtcccagaagacaatcaaatgccttccaaaaaaggtggtgctaaaaagattgcactcacctttaatacgacattaaaacctagcactattacgagtgtcattaatcaactaaacgatttaaacatcaaagcaacttttttcactactggtaaagcagctaaagaacatccggatcaactgaaacaattactcaaagctggccatgtcgttggcacccaagcgtataacaacgatgatgacttggatacaatgagcgcgtcagaaattgccgataacctcaagcaaaccgatgccgcctacttcaaagccagtggtcaattgccacacttattacgggtcacaaccgaaacccctagtacggaattaacaaccgctgctagccgggcactaatcgcttggagtgttgattcggaagattggcgcttagatattgatgcgccgacaattgccaaaaatgtaaatgagcgtattacaggtggtgatcttgtcctactgcacacaagtgaggcaacgattaagacattacccgcaattgctaaagaacaaaccgctcaaaaacgacatttcgtgacagtcaacgagctcttcaagcaacgattaacaccttatcaacaatatttcaaagctggtgatcaacgctcgctacaataacgcaaaaaggcccgacaacttaaattgtcgggcctttttgtaatctaaacgtgctccgtaagccgcacgctatttatgttttgataaatcaacttcttctagtggaatcatcttagttttgtaccgtactttatagtaaacatatagtacgacaaacaatggaatgctcatataactaatcccaatcgctgtccaatcgaagttcttaaaggcttgaatatcttgccctgcaatcaccaataaacaaagcacgaatgcaaaaatgggaccaaatgggaaccaacgtgcatgatatttcaattcgctcaactgatgaccttgtgccttgaacgcacgacggaaacgataatgtgacacagcaattcctaaccaagcaataaacccagtcaacccactagctgccactaagaataaataaatccgagttccaaaaatacttgtcacaaaggttaaagcccctacgattgttgtaccaatcagtgccattactgggataccacgtttgcttgtcttagcgaaaattttagctgcatagccatcttcagccattgaccacaacatccgagatgaagcgtacatcccggagtttgccgctgataatactgatgttaagatcactgcgttcatgatgctggctgcagaagctaacccagcacgcttgaagactaacgtaaatggactaacagcaatattcgtttcactcgcgcccaacaatgagtggctatcataaggaattaaacaagcaatcacgaagattgaaagaatataaaatagcagaatgcgccagaaaacttgtttaatggcctttggaatactcttttctggggtctttgattcaccagctgtaatcccaattagttcggtgccttggaatgagaagccagcaacgacgaagacactcaacatcattggtaaccccccaacaaatggggccttcttataagtgaagttactcaagccagtaggatggccacccataatcccgagaatcgttagtaacccaacacctaagaaaataatgaccgtaatcactttgattaacgcaaaccaatattccgtttcgccgaatgatttaacgctcgtgatgttaatcaagaaaattaataatagtgcgactaagctaaaaatccaccctggcatatcaggaagccagaattccgtaacgagtgccgcggtactaatatcaaccgccaacgtaatcgcccagttaaaccaataattccaccctaacgcaaaaccaagggctggatcaacaaaccgcgttgcataggttgagaaagaacctgagacaggcaagtacgttgccatttcacccaaactggtcatcaagaagaagaccataatcccaatcccacaataggctaacaatgcaccacctggacctgcctttgcaattgctgaaccacttgtcacaaataagcccgtcccgatactaccgcccaacgcaatcatcgaaagatgccgcgtctttaactcccgcttcatttcatttcctgccataatacttcgctcttttctctatgatttcaagaaaaagccccaaccacgttctagcaaacaaaaaaacagtctttttgtctgctaaaaacgacaaaaagactgatagccttataatatccgttgatagcgccccgtaacatttcgttacgacagtccttgatttattcaaccaagtcccaacatcaaaatgaataagcaaattgacatttcggcaaattcccctttaattatccctcattactgcttagtcagttcaggataacgactcatggtttttgcgacctcttatcttgttagaaatgagtatacagaattcacacaaccacgtcaattatttccattaaaaaaccacgattatttcaatcgtggttttcattttgcttattgttctttatctttgcgtgatttccgccataaaagaattatcaatagtaggataatgacaatcataataccgataatgacatataaccaccagttattgttctctggtaattcaacggccttatcgttatattttgcaacttcctgacgggtaatctcgaagtttttagaaagtagccaactccccttattcgatgttacgcgtaacttaatattatatttaccggcttttaatggttgattctttaaatcaatcccgtaattaaagtttgaattaggggccatctctaagtcgctgcgtttgttctgatacagaaccttgtttgacccaactttgcggatttcacctttaacaaccatcttaccgactgaattagctttgacgttctgaacattggctaaaacggcagtatgactattgatcaatcctgctttcaccttattcagccgtagactaggatgcaccatttcatctgattcagtcagtttagctgcaagaatgtaggcatattggttggttaaagtagccccaccttttcgttccaacgcctgatcaacctgactcttagggacttgtgaaatataaaagccacctaaaaccagccctttaaatgattcatttggcactgttaaatcgaaagtcaccgtctgttcaccgttagccggtacctttacccgttgcgcgcccgacatcatatcactaaacgaatactttaacgagctatctcgcttagtattggttcctgtataatcaatcaatccattttcattggttgtcgctgtcgtaggggtcacatcgaccgtaattggttttgttccactattttgaacccgcacaccaacttcttgttttcgaccaggagtaacttttaaatcataatagcccaactccgtatccgtttgattatcaggatagacgggcgtaaccgaataagtcactttctccgcctgaactggttgatgactaaccatcaacatcaggccaaaagtggcaaccaccgctaataacaatccaaatcgttgcttcattcgtctcattctattcgctactccttctaattcagagtacgttttatgtaataaaataataagttttcagcaaatatatatttttaattttggtgttaattattttcttcactattaatcttaatcctttgttaacaagtggtacggcgttaattggatatgccattgtccattttttaaataaattcttaattttctgaaactatcaactaatcaattgaaaacgaattttcaatttcagcacaaaaaaagcaatccaacgatcggattgctttcactctattttaaatttttaatgatcttctggatgagtaattcacgttgttcggctgattgattccaatcaatcactggaatggcttgatgcccaattgtctcaataatcaagccagaaacagtttgccgttttaactcgttcgcccatagcatgtccgccttgtggaacgcagcgttaataatcaatgttccttgtttagcaacgggttggaagtcattgaagaccgtatccaacttacccgtatctggataagacttaatttgtccttccgtggccaacacaacatcgtagattgaaacttcatcagctggccgcgctagtgtaaaaccaccactattaccagaagccgatttcactagcccagccactactaacttacgaataattttgcgtaggtaagtctgtgacccgcctaagcgatgatgaatgacttcagacgaaattgtgtgttcaggatcttgcgtcgccaaaagtacgataatacaagttgcttgttcaaacgcccgtgttaaatgcattagccctgtcccctttttaacagtcgcgcactacgcctttcgcgtcttaatgaatgaaccagaggattgacctgcgtcggtttgtacctcaaacccatatttttcaagaatgtgtgcaactttcttaaaatcatctctatcgaacgtactgatattaccatcaattgtttcaatttccaacttattcgctaaattacagaaggctttcactgccaattgtgctaaaccaagattttggaaatcataaacagctaagcgtgaagctgctcccaatgtttcaagaactgtaatgtgcatttcttttttccatttattggtttcaaataagagttgtgcttgaaaatcaaccgttgaatgtccaaagcggtcgacgttagcgtatggtgtgtagacaaaaatcgaacttgtcgattcttgttgaccattttcgcgatagtctgtatagacgatgtactgcttaaccttttcatcattaacctgattcatacttgatagaatcgtcaaattttcgtttgcctcaatttgcgctaacttccgtgcataggcttggtcgttttcgtttgccatttgattaacccccatttgtctttcaaaccgattataccatagctttctcatttaaaccgtgatttattacggttataaccatgttatttttacaatttgaaaacgttcactattcggcggtagtactgaactcgttgcccgcctaaataatccggtagttgtgattgataagtcttctcgaactgaactttctgtaaactctcttgcgatgcttggttggttaaaaagcaggccgcattaaaggtgtttacaccagtttcttgcgcataggcttgcatcgttgccggcaatactgcgctgataatcccacgtcgttgatacgccggtaagatggcaaaactgagttcatatgccgcgactgattgtccatctacactaagggtaggggcgagcattatcaatccttgcaccacctgcgttgcgcgatcaacaatcgcccaagtatcctcatcattcatcaacattgttagaaacgactgcgcttcttgttgagattgaaaagccgtcatatttagctgcgtcacaatctttttttgacaaccaatttgatagaccacttcaagatccattggttgaaaatgccgtagttcagttgtggcagtcctaatctgcatctagaacaactcctttgtcatatcaacactcatagtaacccacttacagtgttgcgccaagtaaattcttatgtttccattaaacaaaagcgccaaatttgtggtataccactttttcagtttatactaataacgattaattactcttgtagaaagcgagcataccgatgacattccgcgattatttccatttattttcgaccgttcctcaacaagccgaatcccatgattattttttacactttattgagacacccgttcctgatttacaacggtatcccgaattaactaaaatttgtgactgggccgcttatgatgatcacagttttcgtctgtggacaagcttgcccctcgacgaattcgagcaacgttttgctgaaattgtcccattaccaagcgattcttaccagttagattacagttacaatttgcaagatacaaattttttctaaagttcatgcttgacttttaattcgaactaccgtaaattgaataacaatcataagttatcttaattcaaactaagtagtgcattatctgggtgtcagaaagtcggtgattgctgcgaaccgatcagggtaattgttacgaaatactgaatggatgattcggctaattaacaggaccgttatcacctgtaagagtggtgtgttaccttaaaatgacacgctaactgggtggtaccgcggtttccaatcgtccctattcgcatcagcgagtagggactttttttgtagagtgcgttatttagcgcttaatatctaaacatttgcatagaacattgccaatcaaaaacacatttcaactatggagggattttcatgttcaagattgcatcgtgcgggggaatcctccgttatcagtcttttgtcgcaccagcctaaccattaaacttaaaaggatgcgatttaaatgacaaaacacaaaactagtttattagaagcaagtatcgttttacttattctgctagccatcatgggtagcggcgtgattgttttccaactttcaccacaaacacccgtcttaacggcgattgccctcttgattctatgggcccgttggcggcactttagctgggacgccattcattctggtatcgaagatggtctcaaaagcggaatcattcctatcattattttcattctcgtcggcgccttaatcagtatctggattgccgccggtgtgattcctagcctgatggtctggggcttcaaaatggtcagtgtacactggttcattccctcgattttcgtcgtctgtgcgcttgtcggcagtgccatcgggagcgcctttaccgtcatttcaaccgtcggcattgctttcttcgggattggagccacactcggactaaacactaccatcgtggccgcagctattatttccggggcaatattcggtgataagtcatcaccactttcacaatcaacaaacttaaccgcagcggttactgaaacagatctatttgaacatattaagaacttgatgtggaccacggttccagcgtttgttggctcattaattttatacgctatcattggccatacctcgaaaaatgtctccctcgataaaattggtgcgacggttgctgtcttaaacacgcacacttcagttagcctacttgcactaattccaatcatcttaattttcgtttgtgctcgccttaaaatgccagcaattccaacactctttttaaacattgccgtttcaatcggtttaatctttttccacaacccacacacaccaattgctaaaattgcgagttacattgaaaatgggtttgttgcccacaccggcgataaaagtatcgatgccttgctctcacgcggtgggattaatagcatgttaagcaccgtcgccttaattatcttgaccttaaccctcggtggcctcttaatgaagcttggtttaatcgaacgcgtgatggcccctcttgctacccatcttaagacgccaggtcaattgctcagcgccgttattgcttctgggattggcgttaacctctttattggtgaagaattcctttctgtgattctccctggtaaagccttcaagagcacctttgaaaaatcaaacttgagtaatcttgctttagggcgcgcccttgaagatggtgggacagttatcaactacctcgttccatggggcgtcgctggcgtttttgccgctaatactttaggcgtccctaccttgagttaccttccattttgtttcttcagtctcttatcaccaatcttctcaattctcagtgccgttactggcatcgggttaaagagaaaaaccgcctaaacacgcaaaaaaggcccaggataaaatatcctgggcctttttttacattaattgcattaggaattgaccgccatacaccagcgcaaaactatacactgcaattgaagctggcttgcataaaataataatccatgtaaatttcttcaatgacatctcggtgagcccagccatcaagcacaagacatcgtctggtgcgaccggtaagaaaatcgcaagtgcgaagaagcgcgcaaagtttttcttttccgtaattgtcccgatatacttgtcatacgttttttcactgatgacgtgtaagatgaacggcttcccaaattgtcgtgctaataagaagttcaagatagaaccaattgcaatcccgacgtaattataaacaaacccccaaagtgggccgaataccaaaaccccggctgcggtgctaatcccgcctggaatgacaggaatcacaacttgaataatctgaatcgtgatgaaaatcagcggaccaattagcacagagtgccccaaatacgcctgcaacgcggtcgtgttattaaaaagaccaagccgagaccaataaatagccaatgagatgcttccgattaatgccatgagagacgttgcgctgattaagcgtcttgaaattgttctactcatccgctgaattccttccaaggttaattttaattataatttaccacattcaacattattttttatcggtcgctagtctgatttaaaaaagcttaactttctaagaacgtccgaaatggtttcaatccttgtgcatgatatttttcaacaaaggccgctacttctgctggatcctgtgtttgatcatcaatcacgagttgttcaacgggtaacggacgttcgttagcaattttaacatcaatcacaacaggttccttcgtgcctttagcagcagcaaaagcagctttcaattcagctaatgtccgtaccgtaaatccttttgcgcccatcgctgttgctgctgcaccgtaatctgccccttgaatggcaacccctgagtgtggttgacccttatcatcttgttcagcttcaatgaatccgaatgaatcgttgcttaatacaacgttgatgattggcatttggtatttaacttgcgtgataatatcttgcatcaccatcgtgaagccaccgtcaccactaatcgaccagatttgacggtcagggtaggcagcctgggtcccgattgctgcaggcactgcgcaacccattgtggcataccatgctgataacgtcatacgttggcctggatgcattttcaagaaacgcaccccatcgattgaaacattcccaacatcgagattaaagatggcatcgtcagtggccatctcattgatttgtttgaagacgggttccacacgtaacggtgtttgatcgttttcttcaaaactggctttccattcattccagttttctttgttggcgagtgctgctttataaaaggcagattttttggcaactggttcactcgcggctagcaatgcctttaatgccgtcttagcatccgctaaaattccgacatccacatggtgtctgtgtcctagtttagtaggatcgatatcaatttgaataaatttggcatctggcttgaagaagtattgaccgaattcataattgctaccgacaaataagattagatcagcagcttctgccaaatcaactccgggtttcgtggctactcgcccagctgaaaccatataagctggatggtcatcggcaacaatcccttttgaaagggctgatgacatcatcgggatactcaaccgatcagataaagcaaccaattcttcacccgcagcacgtgcaccctgaccaaaataaataatgggttgttttgcatctttaattaactgtaatgtacgatcaatatccgcgcttcttggctctggataattgcccatttggaataagtttgcagtggcctcgaagttatcttcaatcggttcccagcctaggttagttggaatcgtgacaactgctacgccgcggtgtttataggcttgttgaatggcttggtcgactacaagtggcatctgttcagccgtcattaccgtccgattatagactgccacatcagcaaacatggggttttcattcatttcttggaaataatccgtattcatcacacccgtagcaacttgtccaactaatgctaatacaggaacattatcatatttagcatcgtagagaccatttaacaagtggactgcaccaggtccggctgagccaaatgtagcagcaatcttgccagtcgctttggcttcacccgccgctgctagtgcaccgacttcttcatggcgcacttgaatgtaacgcataatcgctttctggttatgtagtgcattcatcgttgaatcaaacgagccaccgggtaaaccaaaaatatggtcaattccccagtctgccatgacttttaacattgcatctgatgcgtttattttctgtgctaccattaataaagacctcctgatgattttatgttccacttacttaagtataccgcttaaaatgtaagcgttacaaataatatgtctttttttaattattgggactggtaaaaaaaaccattttttggtatgcttgcactgagctagataataatgattataaataactaactttaaatttttatttggaggttctgaacatggcaattacacccacagatgcacaagacgtttttaaagatgctggcgagaacatcattttcgtcacccagaaattgaatcggcaagatgccgaggcggacaaagcggctgttaccgaattagcagcgcgcattccagcgatcatcaatagcatgaatatccgttacccagatgcccacttacgcgtggctttcgggattggctcggatgcttgggattacttattccctaacgcaccaaaaccaaaggaattggaacccttcaaggcaattccaagccctaaacatgatgccgtcgcaaccggaggcgatcttttcttccatattcgggccaaagaaatggcggtttgttatgaagtattagatcaaatgatgcaattcatttctgataacgcaacaacgattgatgaaacacacggattccgttacttcgaaggccgcgcgatcatcggcttcattgacggtacggaaaatcccgctatcgatgaaactgctgaatacgcattagtcggcgatgaagatccagaattcatcaacggttcatacgcttttgcacagaaatatatccatgccatggacagctggaaccatacttcaactgaagaacaagaaaaaacaattggccgcaaaaagttttctgacttagaacttgctgacgccgaaaagccaaccaacgcgcacaacgttgtctcacaagataacgaaggcggtgtggaacataagattgttcgcatgaacgttccatacgcaaaccctggcgaaaaaatgaccggtacttactttatcggctattctcgaacatggtcagtgacaaaacgcatgttaaccaacatgttcgtcggcaaaccagccggcaattatgaccacctactcgacttcagtgaaccaacaactggtgccctattcttcatcccatcaaaaacaacactagcaaaaatagcagaagaagaactatagagtgctgactcaaacgggttagactttgaggattaacagcattattttctgagcatccaattaaccaaattgggtgcttttcttttactttttaagcctgttaattgacttaacaaccatttgattggtacactacacttactaataataagaaaatgaggctattcatatgtcagaaacaatgcacgctattgccatccaacaatatggtgacgaaaaccaacttgaaatgattactttaccaatgcctacaattggtgaacaccaagtcctaattcaatctaaagcgacagcaatcaacccactcgactggaaattacgtgaaggtcatctcacaagcatgttccaatgggaattcccaatcgttcttggctgggacctttccggggtcgttgttgccgttggatcagccgtaacagaatggcacgttggtgatgaagttttcgcacgacctgccacttcaaatcgtggtacttatgctgaatacgttgccgttgatgacaacttaatcgcaccaaaaccagccaatgtcacttttgaagaagcggctgccgtcccattagctggcgaaactgcttggcaagcactctttaaccacggtcacctacaaccaggcgaaaccgtcctggtccaagctggttcaggtggcgtaggttcatatgctatccaattcgcaaaagcaatgggcgcccacgttatcaccacaactagtgcgaagaacttcgatcttgtccgtgaacttggcgctgatgaaatcattgactatcgaactgaaaaagtggccgataaagcccacaatgtcgatctcgttatcgacactatcgggggtcaaggacaagtcgatgcatgggctgtcctcaatcctgaaacaggtcgccaaatttcaatcgttggtgaagcgcctgaaactgcggccatcattaaagataccaatatgactttcaaagccatctggttaatgcctgatggtgatcaacttaaaaagattgccgcattaatggccgatggtaaagtcaaatcaattatcgatactgtcttcccattttctgctgatggcttgatcaaagcccatcaactaagtgctacgaatcactcaaccgggaaagttgttattaaattctagatctcccaaaaaacaccgctaacctaataggctagcggtgtttttttaatcattgaataattgatcactttctttgtcggtacgattcccaatcgtataaatttcgaccattacgaaaattaattcgatgggtgggaagaaataaatagcgactaatagaatcacttgaatcacccagaaataaggtttagtaatcgtgctatagatcggcatggctttaattttttgataccgctcaggggcgacttcacgattggcgttcgctaatgcatcactcaagaagaagtaggctaataaccaaatcaggtgaaccacgtagtaaaaatattccggaccgcgttcattgatgaaccgccccgtccaagccgttgcaacgggtaaaaatgacatggataataaccaaatattattcagccaataaatacgctttgttcctcgtttcgtcagcgaaaacatatagtaatgattataccaagcaacccctacgaaaacgtacgtaatgatatacgcaaaaaagtagggaccattttccaaaagtaccttaatttccggtgtttctggcgttttaaattccaagatcataatggtgacaataatcgcgatgacagcatcgctaaatgcttctaatcgacccttattcattctatacatccccttaaccaaaatagctaattttatattttacactatttaattatgatgtgctattatttatagaatgcctgatgtaccagtgcattcaacaactaatccccaacaatcctttcaaagatacttaaaaataaattgatttcagccattaattaatagtataatttatctacgtagtaagggaggaattatcatggaaagagagtatcaatcacgcgcttcacttaaaaaagaagttaagtcattatttgctggtcattggggaaaggccgttacgttgaacatcatccccactctgctatcaattattggggtgattattgtcggagcagtcttgatggccatgattgccatcttcgcaaacaccgacccatcaatggctgccaatgaatctttttcgggccattcgtctggtagtagttttactggtcaaattccaagtttcattttggggctcattacacttgggattaattttactttcttagattggctccgttcgaaagatgctgattttagttcactcaaaggagctttcagtgtcttctcaaaacgttatttcttgggcgcttttctaattcgaattttagctagcttatttacattcctttgggcattgttattcattattccggggatcattaaaggctacgcttattctcaagcttcttatatcttcaaggacttaacagataacgatccacaagctgacgttagctttttagattgtatcactaagagtcgtgagttaatgaatgggcataaattccggtttttcgtcttacaactaagcttcttaggttgggatattttagctggcctctcacttggcattggctatttctggttaacgccatataagaatgcaacttatatggcattctacaaagatcttgcaggcgatcaatttttacagacaacttctgcagatgaaccaactgaagaagttactgttgaagcaatttaaatgaactcaagacgttcttaattgggcgtctttttttgtattatgcggtgattagcagtaggcttagactaaccattttattcagaaaggatgacgtcatcatgaccactaatcaccaaatccaacttgataccgaacataattggcacgcagtgtctggtgaaatccctacgcctaaacctgaagagctactgatcaaagtcagggcaagtagcgtcaaccctgtcgaccttaaaagacgagctagcaccacaaccattttaggctatgacgggtatggtaccgtgcaagcggtcggcgccactgtgaccaactttcaacctggcgatgttgtcttctatgccggcagtacccagatcgatggcagtttccaacactatcaatgtgttccggccgcgatttgtgcgcttgcgcctagtacaatcagtgccgcggagattgccggcttaccgcttgtttcgttaaccgcctatgaattactttttgaaaagcttggttttaccgctgaacaaaatgccaatcgtggcaaacaactattgattatcaatggtgccggtggggttggatcaattctcagtcaactcgccaagtgggccggattcaccgtcactgccacaagcagtctcactcatttcgactggctaaaaacaaacggagttgatcacccgctggattatcattcacctagcagcttagacaacttagccagtcttccggataacacctttgatgccatcgcggtcctttatgatattgaaagctatctccaagaggtcgcacggctgattaaaccgtttggacaagtcggtacgattgttagcaatacgcatccacttgatctcgcactgcttaagcctaaatcagcctcattttcatttgagtacatgttcactaaaacggactatcaattccaaaccactagtcaaggggcgattctccaacaaattgcgcggctaatcgatgcgcggattctgcatccaatcaccaccgcccactacacaggcttaacggtcgctaatctccaaatgattactgataaactgttaactggccatacgactggtaaacagggattggtctactaaacgcaaaaaagccgcaaccaaattggttgcggcttttttaacacaacagtcatcgagttgcggggattgaacccacatcaatcattcattttacgcttcgcttttaatagccaatcgcttttgattttcttgggaggaatttcaatttagatgattggttctaccgttaaactacaactcattgggtgttgctaagacacttctttagggaggaattgtctcataaaattaacttgctcagattcacttacttgggagatgcttatctgatatttatagaataccaagcagttgggaccaaattgtgaactttcaagtatgaaatgatgtccgttaaaaaaagccccaccactttggtgagggctcaattttatagctcatcttccgtcgccaacaaaccatacttcactttaaagcgactgatgattcggtaccacgactgataaaagaagaaaataaaaaaaacatttgataaagcatgggccaagtcaaaatagaaactcgcgacataggctgcaataaaagtcttaatcgtcagtggattgacgtatgcgacaaaataccacagattcataatccacccaaaaataaagccccagacaaacccaaaaatacagagcaagtatttattctgtgcccactgatggcgactaattaagcctgccgtaacgcccatcatgccccagcaaaacatttgccatggggtccatggcccttgtcccaaaaacatattcgagacaatcgcggcggtcgaaccgacaataaaacccgattctggaccaaggactaatgccgacacgataatcacaaaactagttggctgaacactgggcaatggtgcaaatggtacccgagtgactgccgcaatcgccgctaaaaccgcgatgaaaataatttcacgggcgcgaatatcccgggtttcaaaccgccaataaaatggcagcatactggcaatcaaacagataaaactgaagatcagaaaatgctgtccttttaaagtgacgataaacaacatgaaaatcgccataatcaagaaagccaatccaaacgtggtccaactattttttaaagctttcatgcgtgcacctcttcccaattcagggcttcgggcaattgactgcgtaacattcggttgatggttgtcgtatagaagaagttatgcgcgaaaaaggcataaggttcttcctccgatacaatcgtcccatcgaataataaggcacactgactagcaaaccgggcactaaaggccatatcgtgacttgccataatcaacgttaagccttccgcttgtaaacgcgttaacaattcacccaacgcccgtttgcgaatcggatcaaggccctttgttggctcatccaacaagagtaactgcggctgcgctagcaatacaatcccgagtgcaatcaattgttgctcgccgccactggcatcttgcgggttacgttcagcaagggtttgaagaccgagctttgctagcatctcttctgccacttgttctggtgttacgcgttttaactgccgcgcccgttcgataaattcttgacggacactatcataactgaaatgatcgctcggtgtttgtgagagataacccactgttttgaaaagttcagcttgcgcccacttaccgatcttcttcccctgtaacttgattgcaccatggcgcggttgtaataaaccaatcaaaagcttcaacaacgtcgatttaccagtcccatttttaccaacaatcgctaaccaatcgccggtatgaacctctagattgagctgatctaaaacataagggtcatttttttcatactgaaagctcacatgtttggcctgcagaattgttacttggtcgttcgtggctattttacgtttagcatgcgttaactgccattgttgccgctcaatcaattgcttcccactgacaacggtcaatggtaatgccgcaatatcagccggtgcaatcaactcattttgtaaaaagacgtgtggcacatctgggacgaattcacgcaatgccggttgcgcccaaattgctgctaatccaccagcaaccggtccttgatacgttatctcaccgccatccatcaaccaaagttgattagagagcggtaaaatatcatccaactggtgttcactgataatcacggtgatgccgagttcgtcatgtacccgttgcaataaactaataaattctttggtcgcaatggggtcgagttgcgctgttggttcatccaacagtaaaagatctggctgtaaaatcaaaaccgacgctaggttgaccagttgtttttggccacccgataaatcatgcacggaagcatacagcaaatcttggaaacctaaaaagctgactaattcggcaattcgtttttgaatatttgcactcttttcaccaatattctcgagtgaaaaagcgagttcctgaatgaccgtatccatcactaattggttatccggattttgaaagaccatcccaatcttctgcgcacttaacccttgcgataaatcagctaacggttggccctcgaaaataatctcacccgaccgtttaccaacgggccagagttcttttttgagttggcgcaataaggtggtcttcccgctacccgagttcccagctaacgtaatgaagtcacccgtctgaacggttaaattaatgtctttcagattttgttgggttgctaatgcatactgaaaattaaattgttttatttgcgcaatgtccaccataaatattcccatccttctagtaatagcggcaaactatcaattaataagactaacactaaacatagccaaccaatttgattcaaatgaatcgagccaagtattggataaatcgctaagcggccaatcccctgtttagcaaaataaaaacaaagtgcactgcctgctacaagacttgccaatacccaaccatcccgttgggtaaatcgataacgttgataactcgttcgcttctgtgacccataaccacgggccgtcattgaatcagccgtttgtagtgcgtcaaccaatgaattaatcaataatacttccatcaaacgcatcccggcatgtgatcgggctctaacactccccgtttccatctgcacaccacgtgttctttggacattcttgatattggtaaaccgccgaataaatagtgggacaaaccgcatcgtaatcatcgttaataaagttagttgcggtgaaatccgcacaaataaatataagaacttatgattcgtcatactctgattataggaaacaaacactagcattaagatcgccagcgaaagcgccattaaaaaaccgtacatgacagcctctgctgtgatcaccgtcccaccaaacgtcgcaatcacgtgcgccccatgattattcataataggattcatcacgacgataaagagcatcatgaacaatgcaccctgcaatgtccccagtgttttcttctggtttttcgcaagcaagttcactgcaatcatcatcaacaattcacttacaagaaaaatcggatgaataaaaaccattgagaacgcaattgcaatcacgtaatacgcaaagatgacgattggatttaattgatcaaagaccagttgcgattttaaccctgaggcgcgttgcgatcgttcccgagattttccgtatacatccaatcaatcacatctccactcttaacaggataattaccacaagaatagttaggaaaactgccattcactcgataaagccatccgcttaacggtcctttatcaaattcgaatagcccattaatgcctttgatatagacgccgccgcccgtcccacgataggatagtgccatcccgcgactttgcaaatcacgttttaaaacatcaatcaccatatccccatccttgatttcaacttgatcaccgttcaaccatttcggattaccttcactaattggtccataaacattgacgctcaccttttcaaggactggttggggcgtcgtagtgggcggtgtaactggtttactttcagttgattgtgacgattgattaatggcggattgggtcgatgccgattggactgccgagccttgttctacagcttgttgcgatgctaattgtttgctagaggccgatttttgtgatgattcatttgtctgttcagattgactgctggacttgcgcgtttcagctgttttccgactttcagataccgccctactatgtgactcagaggccttagatttaactttaccatctaaaccaacagttgctggcttgacccgtttttttgatctatgttcctctttaacatgttgactacgcgtagacggattatcttgagccacactttgataggtaccgtatccgatgccgcttaaaataactaaactaccgataatcgcaatgattctctttttagacatatctaactcctaacgatgttcaacttgacgcttgaaccaaatgccaataatcccagtcaaaagtatcaagccggctacagaagcaactactgttgagttaacacccgtttgtggtaattgcttttgctttatttgagcatgatcttgattgtctgcttggtgtttattttctttttcaaccgtagtcacttgtcgttcaaacttgaaactgattgtattattcgctgcattaatcgtgatggatttggttggcgtgtcttttaattgataaccctcaactgcaacatcagatgcattaatcaacattgtgcgtccaactctttgatgctgcaattgaattgttttaaacactttgccgttttgatcgactgcttgcaccgtaacgtcagcaaactgcgctgcaggaattgtcccaatcatttgtttccgatactggaacgtcacggtcgttcccgttttagcaacttgaacagtttgttgtgcattgcctaataattcataaccctcaactgcgacttgattagcattcaccgtaatggtttgaccaacgggttgttcagctaattgaagactctttaaaatttgtcccttttcatcaactgcttggacctttaccgatgctttttcaataactggcgttttaaaatcataaattgagccttttcccgcttggaacaaccggtattgggctaacgtataaacggcttgttcagttgacatcgctagcgatcccatatcgttattaatattccagcggaactgtccatctgctctttgataagcgaccagccgtgaaatcgggttagcgccttgatcgccaacaaatgttgtgactggatcaactccagctgcaattaagcccatgacaaccattgccgtactatttgagttttcttctgtcatataaacactagggattaaaaaaccacccgtttgtgcaacaaatgttttttctttcaacatcgttaccgctttatctagcgcatcttgaacgcctgggaagtcacgatgcatccccaacgccgtcatcgtcatcccggtcgtatctaaatcacttttactaccgaaaaaagcccagccattttcagcgttttgtgcttgtaaaaccgttggaattaaactatcaatcgcttgctgtgccttggcaccataatcacgcatgctaagggcgatgatgccgtaaacttgcccgttgatcccaccagttggtgctttttcaataattttatcaattatatttaaaccagcgaagttggttgcatcttcaccaagtgctgttaccccaattaccaacacttctaaatcggttgccgaaaaacgttgatcagcgagcattgattgtgcatccgcaaccaaggcattatgataactcaagcgttgcgctgcactcagtgtcacgcctgattgaatagctgctaacgctgaccatgcatctggttggccattattcaccaactgttgcgccccagccaccattgctttttgataatccgtactagatgcagtacgtggtgtcacttgtgtaacctttgtctcactcgcagacaccgtttgtgcactaccaataactgaaacaacaggcattattaacattaatcctgtccataataaggtaaaaaattgttgtcgcttcttcatttaactctcctcattccgattaactttgataccctataatttaccatatttaggagctagaaagttggccctataaggttaatcttcacaaatacgccttaaaaaaaacttcatttcaaacacaatttattcatatttaccgcctaaactaatatttattcagttttaaggaggaaatacttatgaattttatcaagcgtgcttggcaaaacgtcatctttaaaaaagggcgtagcttcttattaataattgtgatgaccgtcatcatgatttttatcatggctggtctattgattagaaatgcagccattacaaccgtcaacaataccaaacaacaggtgggcgctagcgtcaccctttctgcaaatcgcgatcaagcgtttaagaaaatgcgcgcctcggctagcagtgatgccccaagtactacagcaacgcgccctaaattaaccatgccctccgtcaaattaaaagacgtaacggctatttcgaaattatccgggctggcaaattataacgtcagcgtcacgacttctgcgaacgcctcgtccattaaagccattacgacatcaagtagttcaagtaatagtggtggcatgatgggcggcggccctggcggcaacgctgagtcatccacttcaacaggtgacttacaaatcaccggagtgctcaataccgcaaccctcagcgactttaaagataatacaagtaaaatcacgaaaggtcgcgctttaaatagtagcgacaaaaacaccagtaatgtcgtcatcgaatctgaattggctaaagaaaacagcctcaaagtcggcgacaccattaaagtcaaagccagcacgacaggcaaaaaagcctatacgctaaaagtagtcgggatctataagactagtcaaagtagcggtggcatgggtccacaacaaacagaccccgcaaacgtcatctatacggcatacacattagctaaccaaattaaaggtcaaactggcaaagtggatagtgccacattcacgcttagtgacccaactaagaaaaatagttttgtaaaagcagcgaagaagattatcaatacgaagaaattcacggtaacagctgatgacagtacttaccaatcactcaaacaatccatgcagaaaatggccagttttgctaataagattgtttggttagtcgctatcgctggcactgttatcctcgcattaattattatcttaatggttcgcgaacggcgttatgaaatgggcgttttactctcattaggtgaaaagcgcgtcaaaatcgtgggccaattattagttgaaatgttcatgctgctgattgtcagtttagctttagccggcattggcggacgattcgctggtcaagcgcttagcaaacaagttatgcgttccgtcacaaccgaaacgacaaccagctcacaaacaaataacatgcaacctggcggtaacggcggccctggtggcggtcaagcccctagtgggcaaactggtggcaatcggccaagtggtcaaatgcaacaacctggccaatctgctaaaaaagccgtcaaagcaagcgaccttgatctgaagattagtgccgtcaccttaatgcaacttggcgcattcggcttcaccatcatcgcatttgccgtcttactcgcatcactcaatattttacgactcgagccacgcaaaattctcattggataattataggaggtccactatgttaacagctaaaaacgtcagttactggtacgatactgaagaaaatacactttacaaagatgttaatctcgattttgaagccggcaaactttacggcatcatcggtagcagtggtgctggaaaaacgaccttactcaccatgctttcagggttagataaaccgcgccgcgggagtattttatacgaaggtaccgatatccaaaaaatcggcttaacccaataccgcaatcgctatgtgtccatcgtgttccaagcctacaacttactcccctacatgtcggcactcgacaacgtcttgactgcgatggccattactcattcgacgcatgaaagtgccgccgatttcgcactcgaaatgctcagcaaggttggcatcaatcccgaactcgcccataagaacgtacaaaaactatcaggtggccagcaacaacgcgttgcgatcgtgcgcgctatgtgctgttcagcccccatcgttgttgccgacgaaccaaccggtaacttagatgaacaaaatacgcaggagatcattcatctcttccaagaattagcccatcaacaacaaaaatgtgtgattcttgtcacccatgaaaaagaagtcgcagcaagttgtgatgttcagtatcatcttcaaaataaaacctttcaaccagttgcttaactaagtaaaaaacgactgagcctgtttacggcttggtcgttttttaacgggcatgctatactgagggcaatcaaaaggagggcttctaaatgctaacaatcttctatggttcttttagccatgctggccaatcatttattattgcagcaacccccaaaggtatctgttttgttggttcacccgatggcactatcagtgaactaaccacttttcttccccaaacgaaattagttgcaaatcaagctgcaatcgctccttatagtgaatcattaacagcttatctcgatggtgaccaaaccacgtggtcactgccaattgatattatcggcggcacaccttttcaaagaagtgtttgggtcgccctacaagctgtgccatatggtcaaaccacaacttacagcgctttggcagctcaagtcgggcaccccaccgcaattcgcgcagtggcttctgccattggtcgcaatccactattaatgattattccttgccatcgcgtctaccgtaaagacgggcaaattggggggtatcgtggcggacttgaattgaaacaaaccctccaccagcttgaaactcaaaccaaataaggggattaatttgaaattttatcaataaaagtctatacttattattaagtcggtggtagaatgtacggttactctacccctttcaaattaagaaaaagagatgattattacgcaagtaactgatgtttatgggttaacccacgaaaactgcaagctgatcgaaactgaaaatgattttactcgcatcttcctagctgaaggtcctgatggtacacgttatacgtgtttactacctgatgcgaaacccaatccaaagtcaaaccaacactttgaatatggtaatccagcagatgcaccatactagatactaaaaaagcgccaacggatattagaatccgttgacgcttttttgttgaaacgtgttctcgccagcatatttctgcacttaaccaaatttaccaaatcagcgattacatcgccaatttggtaaatccagtcaatgctcagcactctattctgccattaatatatccaagaattgttcgccgtatttttctagtttattttcgccgacccctttgacatctagcatttcagtcaaggaagttggcatgatttcacacattgaatatagggtcttatccgagaaaatcacaaacggaggcacaccttgttcttccgctaaatcgcggcgtaactcacgtagttgttcaaataattcattatcttcaggcaacgttttttgcactttgaccgccatcttgcgcgtcactttcgcttggccttttaagactgcaactcccgccgccgtgatttgcagcactgggtattgaccgccagaagcttgcaaatatcctgaagcgactaagtaatcgatcaaaccactgatttctttttgcgaatcaccacgcattagaccatacgttgggagttcatcaaagcggaattgcatgattttttgattcttcgagcccgtcaatacttgcgccaccaacactttgccaaaccgttcatccatccgtttaacgcacgataagactttttgtacatcaatcgtgatgtcttgttcttcacgcgtatccagacagttactgcaccggccgcacgcttcacaatcatcatcaaaataattgacgatgtactgttgcaaacattgctgcgtattggcgtactgcgtcatttcttgcaacttggcatattcttgttgcttatgcgcttcgtccatttccgactgatcgataaagaaatgctgaatctgcacatcattcactttaaataatagaatcgcttcactcggcaagccatcacgcccggcccggccagcttcttgatagtaagcctctaaactcccaggaatctgggcatgcacgacaaagcgcacattacttttatcaatgcccatgccaaacgcattagtcgcgaccattatcggtttgcgatcatagagaaaatcctcttgattctgacgacgcaccgcttcgtttaatccgccatgatacattgtcacatctaacttagccttttcaatcagcttcgtgagccgttcaacttctttccgtgtgctggcgtaaataatcccggatttttgtttgttgacctttaaataatcgattaagtagcgatcactattttgatttttaactacttgaaacgcaagattctgccgtgaaaaccccgtcttaacttcgtgctgaatgttcaaccgttgcatgatgtcagctgccacttgtgaggttgccgtagcggttaaagccacaatcgttggtcgttggcgcatactctgaatcgtatccgtcaggcgtagataacttggccgaaaatcgtggccccattgcgaaatacaatgcgcttcatcgaccgcaatcaaatcaatcgttaattcagctaaatcagctaaaaagtaatccgaatccaagcgttccggcgaaacatatagtaatttcacttcaccacgcgcagcttggttaaagcgttcttggacttccccctgcgttagcgtactattgataaacgtggctggaatcccattttcattaagcgcatcgacttgatccttcatcaaagaaatcaacggtgataccaccaacgttaaaccggttagcatcaatgctggtatttgataacacaatgacttcccgccaccagttggcataatcgccaagacattagtgcctgccaacaatgattcgatcacatctgcttgaccttctctaaagtgatcataaccaaatttttcttttagtaccgcttgtgcttgcatgccatttctcccacccgttaaaattcctaccttctatcataacaaagattcgttaattccggttaattgaatctcagtttcaagcattccttcaatcaattcttactggctgacaaaaccagcgatttagtgtttaattagaagcatcaaagactgtcaggaggcttcctatgaccttggaaattaatgcaacattaacggctacccaaacgatcgtcgatttaatcgaacaacccgttactcagcttttaattgaacaaacaccggctaatacaaccgcattcgcacaccccgctttattcctcggttttgcgcagcaacaactgcaacaaattgaacaactctccccacttgaaacagcctcgactgatcaagttgacacgggtatctggattaccatggatcctgagtggactgaacaaattggctacgtagggcagctattagccgaacaaaatcaaccaccgataacgagcacctcgcttccgtccaacgtctctcaaaatttccgaacaaccttagctccagccgttgaagccatcatcttggtcctcagccgctttggttatcccctgaccaaaagcgtaccagtcaaagcaaaaccggctaaaacacgtcatcgatggacaaaagccgtcagccaaatcgaattcactgttgctacgcgcgaagcacaaggaacagccatctggcaaaagcgcaaagagatgttattgaaagcgggggcacaattatggccaaccgcgtcacttaataaggatggctcgtttggctttgctgctaaaatgggcactcacttgcgcaacgaacatgcagcgcaaattcaagacaatcaaacgactgaagacattattttcaagagcgtgaatgaaatcggcctcttcttgtactttggtggcaccaatagttggctcgaactatgcgacacaaatggtcgctcaattgacgactggactaaaatctaaaatagaaaagagattcaacatgcaaattatcagttctggcattcatcacggctacttcgacgacctctacggcggtcatggcactcaatttaacgcggaaggtgtgccaacttattccattccgtttaacattcaagacgcacctagcgatacagtcagttatgctgccgttttctacgatctagatgcctacgaagtgacgcaagggtttccttggattcactggacacttgccaatttaaaaacgaccactgtcgcggctaatgctagccaacaagcgcccgatttcatccaaggtgttaatacttggcacagtcccaaaacagaccatttatcaacagaagcaagtgcttgctacggcgggatgacaccccctaaccgcgatcacacttatacacttaaagtatttgcacttgataccacgctcgatttacagcctggcttttacctaaatcaaatgacagcggcaatgcgcggtcacatcttagatagcgctattttagaagcacaataccgccaatttaaacattaggtgacaatggccttaactcggctaacacttttgtcatctgatcttaaaatcgtcgcttttttacgcttaacatcgtatgataactttatcaattcggaataaggagttctcattcaatgaaaaaaaacaattagcattattgcgataatcgccctcatcatcgtcggatttgctggctaccgttaatacaaaaatacgtatgtcggcgaagtaggctacgccaaagttgctgctcaatctccagctaaagaagccaccaaagatgattcaggtaaaacagtgactaatatgtatagctatcactaccaactaaatgtggtgaaagaagatggtagccaccaagtggtccctgtcgaagttactggcgaaaatccaacgccactcactcccaacagctatgtcaaagttgaatttaattcaaaacgcgtcttaaaagggcctaatactgtgtccaagaatcaaattccggctaaagttctggcgggtttagataaataataaattagcttatcctagtaccattaatacttgttattagctgttaccctcttaaattaagttattaaaaagcagtacccttgattagttatcatgggtgctgctttttgtatgtttcctgtgaaacattttgttttgtttgattttctttaaggcttcacgttgggcgaagattgttagttcgtgttcttcaacaaacgtcatcacccactcaggattttccttactatagttacgtaaagcccagccaattgctttttggataaagaactcatctgtgtcaatatctgccagaatggcttcttccaaaaacgccacattcgttttttcgtaaaaactgagttgtagcgtaatcgcaatccggcgcagccagaaattctcagcacctataaaatgctgtgcaacccaatcaaactgttcaggatgcagtctgatgtactctccaaatacttttcgccaagcatcgatgctgtcccaccaaactttttccaacaccaacgttaataaatgttccatatcagccggttcccaccaacgtactgaacgcaatgccatctcgatggcaacatattgatactcacgcgttggttgagcatataaagtctcaatgaactgcattatttctgctggtgacaattgtttcacagactgccacaattcgcgttcaattaaatggcggtccggtgctttaacaccgttaaattcaaattgactctgcatgtatttcttcattgccgcctgattttctggatatatcggtaattcaaaatccatggttatccctccactatatcgcctctaaaaaacttgtgccgtttgtttagctgtttcaatagcttcctgcatgatcacgttagctttttctggcgaatgatcaattccttcaatattaattttaatgacttcgtcaacaccggcaaagccaaggattgttttaatgtattgtgttgcaaaatcttggccagcataaacgcttccggctgactgaatatgaactgctttttttccagttactaagggctgcggagctgtttcagtatgtctaaatgtttttccagccaccatcactgtgtcaatccacgctttaagtttcgtcggtacatttaaattccaaagcggattaacaatcacaaacttatcggttgctaagaactggtcggtatagcgattaaaccgagcgaccttctcttgctgactagcgcttaaggtggccatagcttgcccttcttttaacgccgcccatgccgtcattagttcttgatcaatttctggtaagtcagattggtacaagtccaaccaactgatttcatcagctggattttgtttttgataaacttgcatgaactgcgccaaaatcgttaacgtccgtgactgttctgtagcaagtggatgcgctttaacaactaatactttactcattaatttccgccccttagtatttaaactttatacactatcattttagtatactatctgcggcgctgtccataagctttacatcatttaataaaccaaccacctattaatgaccttttacaacgttttatacagcaacaaacaaccaaaaacgattaataagtcataaatataccgcaccatcgttcgactatcaattcgagtgctcacccaattgcccagcggaatcacaactaacaataatggtaagctaagtcccaatagttgcaatacttggatggtccaaaagcccgctagaatatgactgattacaacgattgtcccaacacaaataaaatgggcctgtagaatgccccttaacgatgctactggccatttttttaatgtcccataaatcaccaccggcacaccatgactattgtaggcactgcccatcatgcctgatattatcccagctaaataatcccaatgatgtgactgtaaatgttgctgctgcacgtgatgtcggtgtaactgatagcgattatagctgccataaaggattaaaaacccagctaacgttctcaacacaatcgtcgttggcacatacgtcatcagcgctatcccgactggcacacccaataatgaaccaatcactagtcgtctgacaaccgctatatcaatctgttggcggtggcgaatcacagccggaatcgccacaattagtcccagcgcgccaatcaaagccgttgccgcttttaaatcaatcgctattagggccaataatggcatcgttactaatgcctcgccaaacccaaaaaccgttctggtaaaagcgcccaacgcaacgatcaaaagaatcataattattgtcatccagaaatccttcctaaaccgttttgttccacacaaccttttcaaactgcgtgcctttactttttagtacggatagacttgcattagcaaccattttttgtgatcgaatttcctcaaacggaatccctagtagtgtgttgataacaaacaataaaataatcccatgcgcaacaactaatacatcaccatcaggatacgccgtttgagcagtcttaatcgcgagcatcccacgttctaagaccgcctggtaggactccgcgtgaatctgtttggcatcaaacagctctggatgatggaagtaattttcatattgtggatggttcgtcaaactagcaccaggttggccttcccaatcaccaagtgccatttcttttaaatcatccacgaccatgattgccggttgtgattgattagtctgcgacactatcgcatccattgtttcaacggcacgtgttaatggtgacgtcagtaacgcatcaaaagactggtccgctaataaactacctagtcgtttagcagccgcttgccccgcctcagttaatgttgaattcgtcccaccaccattgaaacactgtactcgattaaccatcgtttcaccatgccgtacaaaataaaaagttgtcatgttgatcccacctttataggatctatcatactataaaatgcaaaaaaagacgcagtttaaattgaactgcgccttcattgagcctcgttttattcaccttccggcgtgttttctgccacgacttggtcataggcctttgtaccagcatagacttcgtcagttaggatgttgcgtttatacttcatgacacgataaatgtggagaattaagactgccacattaatgaccagtgctaaaccactgattgtcatcaaagcagcactactgtgcgtaccttgcactgaaaattgtgaatccgttacaaaagcgggataactcattgtaaacatcatccaaaaagccaatgtttgcgcacgtgcttggagccagctcccttttttaaccaggaatgctgctaatgtacatgaaattaataatgcagcgcccgcatagaatgagtgatcaccaacacaattgtaaacataggcgaagttccaaacatcataggcgataatccaaggccagatttgatcgggccagatcatgtctttttgtttgtcatgactgataataatgccaaaccagcctgagattgtgatgatgttaataatcccggcagccccattcatgatgttccacgcgccaccattcatgatcacgccgtcgactaagccatgtaggtgtgaaacttgaaaatcacgaatcacagcttccataatattaaacgctaaaattgcgggtgggaaaatcaatgcccacttgttatgttgtaacttagggataaagcgcagcgccataaaccctaaacaacctgctaatgctgagtacactttaacccagtggaaccaagtcccggtactgctaccaggaccagccgtcgttggccaaacaaagagcgttaaaacgactggcaacccaacaaagagaattaatccaatccacttgttagcccgagctgcttcatttaaaaccattaatgcaataaccactagtccccaaactagccaatccattcctgaaatattttgaaataaaaacatatcagtcacctccaaagaaataattgctaattacattcttactttaactgcaagctggcggtttctgtatggtcaattcaggataaatgtccaaatctaatgattattttgtaaaacatggttcacagtaccatttaacatgcgatgcatgcgctgataaaattcctttttagattcttgtagatttgttacaagccattgcgtaatctgtgtcgccaatgcccaaccataaaattggcaatttcatctcggaaagtcgctggacaatccacctttaaatcttgaacaacccctgcaaccatgttaaaagcaactcgatacaaaaaacgacttagtaaatctcgattaagtgaatgaaacgtatttaaacagaaatgccgattgttttcaatataagttaccaagacacctagaccgacgacccaatcccgttcacgttgatacactgccagttgcgtaacaatttcacgattataaatccaagcaaccaactcattaatatcggcgaaatggtaataaaacgtattgcgcgcaacgtcagcactgctcgtcaattgattgaccgtaatgtgatcgaccggagttgttttcatcaattcttttaaggtatctgctagcttttgcttggtatccatcgtattgccctccaaaaattatctatgattagcatcccatagatagttccgaactgcaatcactaacccgatttgcactccaggataaattgttctatcgttagagagtacaattaacggaggcgacttataatatgcacgaaactgacgacgcttttagggcgatgaccaatggggaatggtactttgattcagcggtcactattcaaaaacgggatgcagcccgccttgccttacaaaaggccagccaaatcttagataacgatgcacggatggccactatccaaaaattactcggtcataccggtagcgattttttcatcgaaaccggttttgaatttagcttcggtgaaaacattacgattggcgatcatttttacgccaatcgtaacgtcgttatttgtgacgaagcaccagtcaccattggtgactactgtaaatttggcccaggagtatcactcttaaccccttaccacccaattgaccccttagaacgtgcgacaaaaaaagaaatttctagtcccattactatcggcaatcacgtctggctcggtgcaaatgtcacaattctgccaggaatcacgctcggcaataacgttgtcgttggtgccggcagtgtcgtgaccaaatcctatccgggtaacgtaattttagttggtaatccagcacgggtattacggaaaattcccgctaaataatcaaaaaggactgacaaatgtcagtccttttttaggcttcaattgcataatattcaataatcgtttgtaaagcctccgctgcgcgttgatctccaattaacttagtgtagtatgctgtaaatcgttcatctgctacatacatggctgctaaaccgcggtgcattgctagactataccggggagtcgctgtttgtaaccacgtttgatgggcttcaaaggctgtttgcgccgcttctgatggcaattgcggctggtccaagtaagtttgtaatgccgtcttcaatcggtcttcagccgcctgcatcgttgcatattgggcctcacttagccctaaaaagtgctgatcggcttcttgcttggcttgtttcccatagttagtcgtcacttcttgcccgtagcgttgctcattttcagccactgcctgttgtttaaactgtttgaatttagtttgatctgtcatttgaattcctccggtttgattttgaagggtcgcatctagctgtgctaacgttgccgttagcgcagcttgttgtttaaccagttgttcccgctgatttgctaagcgttccagacgctcggccggtggtaacgccaacagctgctgaatctcagccagactaaactgtagttgacggtacattaagattaactgcagtcgatctgcatcctggctcgaatacgttcgataaccattactagcaaccgttggcaccagtaaaccgcgctcgtgataataacgtagcgtacgctcagaaaccccggtcaattcagcgaaagttttaatctgataatccatttgccttccctccttcaaaacccactataaggcctgacgtgacgtgaaggtcaagcattgttcgttagtgcctgattaatttctgtttaaccaagtaatcatgggctacatcgcgtgctttgcggtgtttgacctgtacttggtagttcatctcttgcatttggctctcagtaatctgacctgccaagcgattcaatgctttgacgacttccggatgcgccttggcaaagccggctttcataatcggtgccccttgataaggcgggaagaagtgacgatcatcttctaaaacaactagtttgtaccgtgcgacttccgcatcggttgtataaccatcgaccacatcgaccttgccgtccgcaatcgctttatagcgaatacttggctccataattttagcatttaaatttaattgataggtgtcctttaacccttgatacccatctttttggtgataaaaatcaggatcaaaaccggccgtaaatggttgattcaaagcggctaaatccgaaattgttttgacattatatttcttggcaaaggccgcagtaaccgccaagtcataaccgttttgatagcgcattggcggtaagtacgccatattgaactgttcttgtagcgatgtttttgcaagttgatacgttttagttggattctggtttgtcttagttggcgacttcaccaacgtctgtaaaaccgttcctgtgaattcaggataaatatcaatcttatcagccttcaaggcgttaaataagaatgtggtcccaccgaaattaggtttaaccgttactttgtagttaggctgaccttctaaaattagatcacgatacatattcatcaagatttcgggttcactacccaatttcccagcaatcgtgatggtggtctgcggcgcttgaaaccgtgtcattccttcgatcacaccgaaaaggccaacaaaaatggctaaactgactgtgatttttttaaaggataatgtccctaaccagcgaattaatgcactgaccactaacgctaaaaccgctgaaagtgtcgctccaaccagtaatagtgcgttattatttgactgaatcccaacaagaataaacgtcccgaggccgcccgcaccaatcaaggccgccaaggtagctgtcccgataatcatcacgagtgcaatccgcaaacccgagataatcaacggcatcgcaagtggcagttcaatccgtagtagccgtttagcgcgcggcaacccgaaggctatttctgcctcttttaatgctggatcaattccgatcaaaccagtgtatgtattttgaaaaatcggcattaaggcataaagtactaacgtaatcacagccggaatcgtcccaattccgacaagcgggatcaataatcctaagagcgccaaagacggaattgtctgtaagacactcgtgacttgcagcattgcttcagctaatttctgatgagctgttaaaacaatcgccaacggaatcccgatagccgccgcaattaataacgccaataacgaaatctccaaatgttgcccaagtgcttgtagcaactcaccggattgggtcgttaaaatttgttcaatctgttgcatcatcgtcataccccccgtttcgcaatgagcgttgttaaatcggtcatcgtcaattgccgttgttcttgaccatcagtggcaactacgcccccatctggatggtctactaattgttgcgctaattcagctaatgttgcactggacgtaatcgttggcggctgattattaacaacagttcctaaatcggccgccaataaatcttgaactgtcaacgatgcttgttggcgttcaatgtcaaaaaattcgcgaacaaattcattttttggttgattaaaaatcgcttttgctgtcccgacttgctgaatactgccttggcgcattaccgcaatttcatcgcccaagcgcaacgcttctttcatatcgtgggtcacaaatacaattgtattatgcagctgcttttgtaaactcaaaacgagatcttgtaattgtgtacgggtcaccggatcaagtgcactaaagggttcatccatcaaaatcaccttaggactagttgctaacgcacgaataatcccaatccgctgctgctgtccccctgataattcacttggataacggctagcatactgatccggatctaaatggaccatttccaaaagttcgcgtgcccgtttttgacgatcagctttggtccatttcaatacctctaattgaatggtaatattttcctcaattgtgagatgtggaaacaacgcaatgttttgtagaacgtaaccaatattgagccgtaacgtttggagatccatttgattgatgggttggccgtcaatcttaattgtgccactcgtgggttcaattaaccgattaatcattttaaccgttgttgtctttccgctaccactcggtccaaccaaaacaaatagaccattgtctggaatggttaacgtcaagccatctaatgctaagctttgttcatattgcttagtgacaccttcaaattcaatcatgtgctactccttttgccggttaacgatttgttaccttattgtaccacttagcaatcagcccaccaattgacgtgcttaaacgcccaatccaatttttttgattcgctttgtgactatgctaagatgaacccgaattgaaatctgaggaggtcttaatatgcaaacacattttgatacaatcattattggtggcggtcctggcggcttagcggcggcttacagtctcgctgaacaacagtccgtcttagtcgttgaaaatgatttatggggcggcacttgccccaaccgtggctgtgatcctaaaaaaatgctttattcagctgtcgaagcactcgacaatcaacaagcactccaaataaatggcttagtcggaactagcgctattaactggtctgaactgatggcctttaagcgatcttatacgcaacaaatcccgactggtaccctcaacggtctacaacatgccggcatccaaaccgtcacgggcaccgcccacttcagtgatgctcaaaccttgcagattaatggtggcacttacactgccaaccatttcatcattgcgaccggtcaaacaccaacgctccctacaatcgagggtcacgatttactacaaaccagtaatgaatttttagacctcgatcgtttaccagaaaaggttgcctttattggtggcgggtatatcgccattgaactggcaaatattgcagttactgctggtgcagaagtccatattattcaacataacgagcgtattttacgcgacttccctgaagttttaacacataaactcgtcaccagtcttcaggaaaaaggcattcactttcattttgacactgacgtcacaacaattacgcaaaccagcaatcagctaactctcagtaatcaagctaatttcaaactgacagtcgacgccgcttttgccgcaatgggccgtaaacccaatatcgaccaactggcattggaaaaagctggggtaacagcgaaccagcatggcattcaagtcaatgaccatttaatgagtagtaatccccgcgtctttgccattggtgacgtcgtagatcgtgtccaacccaaattaacaccagttgctggttttgaaggccgctatgtcgccaatcaactactcgctaaaaagacagcacccattacttacccactcattccacatacggtatatgcaagcccacaaatatcacaagtaggcgtttctgttgcaactgcacaagctgctcctagtcaatatcgcattaatcaacaaaccgtcacaaattggtataccttcaatcgtattcaagaatccgacgcaatggtcatcaccatttttgacaatcaaactaaccaactcgtcggtgctgcggcttacaccacaattgctgaagaactcattaattactttaccaacctgattaaacatcagacaaccgcaacggaactcaccgataccatctataactacccaagcccggcgagtgatttaaaatattattattaaaaaaagtgttgagggccaacttactcacgaccttcaacactttttttaattttcttttttcgccttcatctgtaaccagatattaaacgcgagcacaatcaccaataggactgtcgcaatcagcatgatgttatgcaagccttggtacataatcgcgcgcatcgctggtaataagtgcgctggtaattcgtgaacgcgttggagattgcttaacttattcatcatcgccatcgtaatttgaccgtgcgattcggcaatgccgcgtgttaaggcatggtttaaaatcacaccgtaaatcgatgacatgaatgtttgactgagaattcgcaagagataggcaaacgacgtcgcaatgggaacatcacgttcttcggcatcttcttgaacattgatttgtaggacgttaaaactcatcccgagcccgaaaccttcaaaggcccccatcaacagtaagaaccaaaacgatgcttggtcgcccatcatcaacataccgctaaacgcaattaaaaacgcaactgttcccaatgtcacaacgcggtgtttacccaatttaggctgaattgcaggacccgccaatgagccaattaagttggtcaccgcacctggaatctgcgtcattccaccgagtagcgcacttaatccaagtaaaccttgcgcccacattggaatatagatattaaacgcgataaatgcgccccataaaacaacaaataaaataaagtcggtcaccaattgcggatttttaaataagcggttcggcacaatcggatcaactgcccggtcttcaactctaaacaagacaactaataaagctaaaccagcaaataccaatcctaaaacgagtgctagcgaacccgtcccaatcatttgaatccccgtcaataaagtcaccaaactggtaatcataatcccagcacctaaataatcgacgtttccggtttgatgtgatttaagcgtttctttaaagaaataacgaacacaaacaattgatactagggcaattggtacattgatataaaagacccaatgccaactaaacgtatcgacaatccagccaccaattaggggacctacaattgaagccgcactataactcgcagtcgcataaccaatcacctgcgcgcgtttgcgtaaatttttgtataagtcggcatagataatgaatggtaaagtattcatcccgccagcaccgatgcccatcaccgttcgtgcaatcagaaagaagacgatattccccgaaaccgcctgaaaaatcgaaccaaccgcaaataataatgtcgccagctggtaagccccacgatttccaatccgttcgcctaatttactccataagggggtcgcaaccgccatccccaaaaggaaaaccgccacaatccagcccatatattgaatcccgtgtaaatcactgataatagcgggcaaagccgtgttgataattgtcccatcgagtcccgccattgtgttggataataataatgctaatgttaccaaaagtgtatttttcttactcacgattgcgtgccccatgtatttttcttttatatttattatagtataagttatttcgtttaacgagcttacttcagtatatcaatcacttttaatatcataccttatcatatacattttcatacaaataaaaaagacgccctcctcaggacgtcttctaactttaatttaatgcgtcaaactgttcgactttttggcgagctttatcactccgccgcatccggataccatattccgttaaaccaatcacaacagcgactatcaagagaatcaataaactcttccaatcttgcttcaaaataagcaaatcgcccgcaaaggcgtagataaacgcgacaatcgttgaacccccaaagcacgccaggccctgtgctcggggggtgaggtgggtgtctccagccgccaagttgacaaaggccgtaggaatcatcggcactgcatagccaattaatacaccaagcgctggatgttgcatcttaattaatgcgcggtaaacacgcgaatccggctttttactgcgatgatttctgacacgggcaaataattggacttgcaacaagttcccgatcgtcaagccaatcgcattgaccacgaaaccaccccaatgacccaaacacgcgccaataatcaatgccaccgctgatgttggcgcacccggaattaaggtgaccccaatcattaacagaccaaacaccaagaaagcatacggccccagatgacgaatctcaagcacatattggcggtaattttgccattgatccaagaaagcaaaaacggcggtctggtgttgccatccaattagaagaatcactaatcctagtaaaatcacaccgcttgctagccaaagtcgtttccgttgtctcttcgtcatctgattcccctcatttctacttaacaaatagtcctagttcctctagtataaacaacctgcaaaggggacaacaagtttattttctattttgattcaattcgttcactaagcgcttattttgatagcgcgtgtagtaataaaaaataatcacgtgcattacgaatgttaataacgacgtccctaataaatacggtgaaacaacatcaaataacgttgtcgaatagagcctcaaagcgagtatttgaaacccaatattactaatagtactaatcaaaacattccacggcgcaccgaacgtcgaatagcgccataagtatgaataaatgacgccaaacacaacgccaatcaacacgcctaggctaactaatcgccaagcagccagcgcttcgccccgcgttagcgttgtgacaacagtgagccacataatcgccattaatgccacttgattaaagtctttgcggatttgcttcatcattttaaccactcctttatttgcttggcataataccgactaacaatatactgtcttccagattgcgtatagaccaccaatcgcgcatttgaacccaccgcaaaattggcaacttgctgcagatttaaaatcgttgtgttattaattctcagaaaaccgttctgcgaaaacggggctaattgttttaaattactagggtagtaatagctattgccatcgattgtcgccaccttcgccaaatgtccaaaggccgtaaaactttcaattgccgttaatgatatgttttgtaatcgatctgttcgcgcatctcgcacctgaatcgattgatcaaaggttagcttcttaaaagcagattcaaccgttgcttgattctgtggttgactgtgaacgacaatcgtatcttgtgcacactttaaatcccaattaaatataattttcattaactcgcctcctctacaaacctaaagatagcagaagatctcgcttaattcgatgactatttgttttgttgcaagctgctctctcttgttgcatataaaaagcctcattcaacaatgaggccttttatgcctatctctatttgtgatacggacttccttgattaatcataaacgcccggtaaatctgttctgtcaatactaagcgcatcaattggtggggtagtgtgagcttgccaaatgaaagtgcatcattggcgcgtttgttaaccgcatcgctagtcccgagtgacccgccgatgacaaatgtgatatctgatttaccataggtcgccaaatcttgaatttcctttgcgaattcttctgaggcacgttgtttgccttgaattgccaggacaatcacatgttccttatctttaatcttgttgagaattcgttcgccttctttgtctttgacgttagtcatttcagcgtcacttaatgattcgggcgctttttcatccgcgacttcaatcatttcgaacttacagaacttactgagccgtttcgcatattccgcgatccccgcttttaaatacttttcctttaatttaccaactgtgattactttaatgttcataaatagcctcctactgttacttacattttaggggaaaacaatgcagaaaaaaagctattcacagtaattcaccggaaagtactgcttatccacaaaagttgtccacatatgcacaagtgttcgtcccaaatatggtatctcgaatttttcttgatactaaataaccgacacctaaattttttcgttaaatttaataaaaaagttatccacccttttttgattgttcgttctcaaattattcggttacaaatccttttatatcagcgttattctggtgttataataattttaaaaaagttatccaccgcctgttaatttttttgtggataactaaaaagaccttttaaccgtgttatacccacaatccacagacttatccacagacgctcggatttcttcccaggttactatccacattgacatttttaaaacttaacattcctgccactttagtctgaatttaaccaaaataaaaaagccgtcaacatctaattgatgctggcggctttaatttattttgctgccgttgtactatctgttgatgctgcttcagtcaacttcactgttgatttcttcaattcaccattatgataatactgaatttcaaccgtactattcatatcgtaactgtaaagtgtcgtgtgtaaatcagcaacacttgtgacatccttgccacctaaaccaacaatgacgtcgtatttactaatccctgccttcttagcaactgagttggcattgactgatgcaacaactaccccactcttcacagaggttggtaatttcaagactgatgattgttgcgttgatgaaacattcgtcaaatcgatgacgctaatcccaagcgctggtcgaacaactttcccatttgcaaccaattggttaataattttgaccacttcgttacttggaatggcaaagcccatcccttcaaccgttgtgctcccgttagaagctaacttcattgaattgatcccgatgacttgtcctgcaaggttaactagcggaccacctgaattcccagggttaatcgctgtatcagtttgaataacggttgcttggccagtcgcttgaccggttgtttcatccgtcacatcaatcgtccgtttctttgctgaaataatcccttgggtaacagaagtagcatattctgagcctaaaggcgaaccaatcgcgagcactgattcaccaggtttaatgctgtcagaatcaccaaacgttgcggtcttcgtcactttggcactatcaatctttaaaacggctaaatcagaaacggcatccgttccgactaagctagcatcaatttttgtgccatcactaaggatgacttccaacttatctgagccagaaacaacgtgattgttcgtgacaatgtaggctttaccatctttcttttcgtagattaaacctgagccttcactcgattcttcaagctcactactactactttttttattggtactatccgcgccaaagagcgcactcaaatcgcctgaattatcttgttgtttttgcaagttaacaactgacacaaccgctttgttgaccttattaaaggcagttgttgtttgtgaagatgagttgactttgatattactaattttagtggcacctgctttagttggtacttgggcagtgcttgagacagtgttacttcccatctttgaaccggcataaccagcaacgccaccaccgattagtgctgcgataacggcaacaacagccgttttcattaatcctgaattctgattcatactaattcacccaaactttctaataaattctgtttattgattatctctatcatagaatgtaaatttgaaaaaattatgaacaagttacgaatattaaattgtttttctaatccgcattttagcgaacttatttcgcaaaaacaactaaaatgtcttctattcagtctaattacacggcaaacaatggatcagcaactgccggatcagtatctagaatttcaaagtctgttcccaccccataatcatgttcctttaagatcgacgcaaccgtcaaatgggccagttccttcatgttattttcttgactcaagtggcctaggaaaacgcgtttagtctggttccccataaacgacatcaaagcggatgccccatcttcattcgataaatggccggtatcactgagaatccgttgtttcaatgaccaaggatactttcccatccgaagcatctctaaatcgtggttgcattccactaaataagcatccgcattttcaattgtcccacgcacttgatcagagacataacccgtatcggtcaggattgcaaaggcacggttattatgatggaattggtagaattgggcagcagccgcatcatgtgacaccccataactttcaatatctaaatcaccaactgacaaggtactacccatttcaaaaatgtgcttgtgttcagcaggcacttcaccaataatcgaagccatcgcatcccatgttggttgatttgcgtacacgtctattccgtatcgccgggccaaaacaccgacaccactactatgatcgcgatgctcatgggtcactaataaactgtccacatctttaagatcgcggccaatactatgcattaaatcttgcacacgtttcccactcattcctgcatcgactaacactttatgattaggtgtttcaatatacgttgtgttgccagaactactgcttgcgagcacgctgacttgcattgcgtctttttctaccatgttttgctctatccccttggtctctttctaaaacaactaaatttcactacggttcttcatcagcgcaccggtaaaggcattaatccgcttaacgacgacactcttagaattcttattctcaatggccacttgccaagctggcacgtacaccgtactactattggcgtccaacaaagcactgtatccgagtttcacccacataatgcgtgagttattcggaatctcattatctgtatataaatcaatgaccgcgtcttgagcagtcaccttcgtactttctttttcacgcaaaacttgaatcttattcgtgtaagtttgcgtgtaatgactaatctgcccgtcttctaatgtaaaaatcaactgaccatgttcatccatgatctgcccgcctgggactttttgcacatatacgacttgttgatcactcgataatgcgtgtgaatagcggtagtcctccgcttgaatcacgttgtctggttccttcataaaggccgccacggctaagcgttggttcccttttttgtaagtcagtggtttatccaattcactcgtcagtgtcatgcgcgctttatcaaacgaaacagtttgaccggttagtttggcactcgccgtttctaataatgtctgatctttttgtcggctggctaaataataaccatccattcggcgcttggagagtttcttcactgaaatttgatcgtcttttaaatccttcataatctggctagtctgtgaaccactagtaatcgccgtcgacgttattgtctgactgcctttcagcgaggcaaataaatagatatccagcgcaataaaaatggcgataaaaatcatttcaattctgcgaaaatccattcatctaactcccttcggttaattcagctttttgcgccatcaatgcggataagctacgccaaacccctttatactgtacaaagtaggttggatttaaatcaatcacttgttcgttactggtttctttggtccattcataaccgacttgcacgttttccacattttctagcaagaaaccattacttgtcaattgattcaaaacagactcggtacttggcaatgtgacttgcttgtcttcagcaggaacgggtacttgcaaactataatttgaaaaatcaatcttttggccagttggtaagaattgtactttcacgctcccaaagttagtctgataaaagactgggaatccttcaacgtaggtccgataagcagtcgaattcgttgctttatcataactatagaaacgcatccctgaaagggcgttacctgtctttaaaagcgcatcaaaactggcttcaaaactctttgttaatgtgcttggtgatttctcattttcatacttcacaaacgaaatttcaccggtatcatggttgatcgttaggcgtttatacaaattgctgtccgtcccatccgtataaatcgcactattgccttgttctttcgtatcaatattatccgtattttgttgattcaacagcgttgtgatgtaataattttcgggttgttgattaactaaataactataaggcaacaacgtttgatccgctgccacatagagtaatggcttgtgattcaacattttttcggtcactttcaaatgcacatcggcatttttaagcacctttttcacacgagcttgtgaaaaaacattgagtgtcgtttggtacacttgatgactttgatcattcatcaaccacaacttaggctgtgtgcccaacgtgattcgaatccgattgaatgtcacgttttgacctaaattattattctgataactgaagacctttttaaaaatagcgtacgaaatattatcaggatataaaagggtcaatgtatgatcctcactaattgcctggtaataatcgtcttcgcttagcttaacttgcttaaactgtgccgacttggcaagctttaaagtcgctttaaactgtggaatcaaactctcttttgagttataaatcaactgactctgattgtctgtccgccacaatagttgcgtcggcaagaagatatcaccgatttttcgttctgtcttacgacttgttgacttagtggtggtttgactgtccgtttggtgctcataatgcgcgttactggtccagattagccatgatagcccgatactgacgataatggcagcaatcagtataacgcgcattaaaaagttattaaatcgcatcccaatcacctccatcagaatcaattggttcatatggcaacgaaatgtagaatgtcgagcctttaccttcttggctatcaacccaaacacgcccacgatgcgcttcgatcacttctttagaaattgccaagcctaaaccagtcccgccttgtttacgagaacgggccttatcaacccggtagaagcgatcaaagatcttaccaaggtctttccgtggaatccctaatccttgatcagagatgcttaaaatcacgtgacgatgtgtttccaataagcgacacgtaatcacgccaccatctggtgaatatttaatcgcattattcatgatattatcgatcacctgcataaatttatcggtatcaatttcaacccataaatcccgcttagtgaagtctcgtgtaatactgtacttcttattcggatcatctgttggcaatttgcccgtgctagttgtcagtttaggcaaatcatctttgtgctcttgatcccgcttgatcatcatatcaaaccgatccagtgcatacccaaagaactcgtttaaattaacatattcgagattcatctttgccgttccttgatccattcgtgacaaactcaatagatcgttgatcattcgaatcatccgatcagtttcttcttgggtcacctttaagaaattgggcgctagctctggatcttgccatgcgccatcattcagcgcttcaatatagctccgcacgcttgttaatggcgtccgcaattcgtgagacacattcgaaacgaattcgcgctgttcttgttcattcttttgttgttcggtgacatcgtggagcacacaaactaaaccggtgatatagccggtttctttttgaattaatgaaaaatcaacatgcaagattaagtcgtgatcttgttgttctgagaaatccaagaccatttcctgttgcgtttctaatagatcgcgcaaagaatattcatcactgattcgtaaaactttaagcaatgactggcccattaactcatcgcgtgtcacatttaaaaaatcttggccagtttcattgataatcgtgatattgcctcgtcgatcagtcgcaatgaccccatcagtcatatgactgagcacactatcaagtcgccgtcgttccgactctgacgcttcttgcgcctcttcaacccgaactgataagttattgaccgcaatcgcgagttgccccagttcatcttgaccataaatcttaacttgcccagagtaatccccacgcgccatttgaatcgcttgtttcttcatttcatcaattggtcgggtaattgcccgggaaataacaatcgataatgccatccctaataaaccagcgactaaagacgaggttaagaaaatgacggtaatcgacgaaatccccttataaacatcttccatactagcccgaatataaacggcgcccacaacggtattactatccccacttgggttcgtcaacggttggatcgctgtataatagctccctagactctcattgtatgccacttcttgttcggtatgcccagagtaaataacctgtttcacccgtgggttacgcgtcttttgaccaacggtactttgattattcaagttcgtgacacctcgaatggtgcccttattatcgacaacttgaatttcggcagaattgcccatatcgccaataatctctttaatattcttgttcgcattaccactattattcagtaactcattactaagttggttttgaatataggatgtcacttgtaaggattgcttaaaatcacgcacattctgatattccagttgcttcacaaaagaagcgccgataacttccaacgttaccagcagcaacaatacgaacacaatggcaattttaaaatgaatcgattgtagcaaccgaattttcttattcatgcggcaaatttactcctgctcaggatttcttaagtagtaaccaacaccccggcgtgtcactaaccattctgggtggctggggttgtcttcaattttttcacgtaaacggcggaccgtcacatcgactgtccggacatcaccgaagtaatcatatccccaaaccgtttgtaacaagtgttcacgggtcatcacttggccgatatgcttggctaaataatgtaacaattcaaattcacgatgcgttaattcaatcttgtcgccccgttttgacacaatataagcatcaggatggatcgttaaatccccgatgttaatctcgtgattttcttcattcgcttctttatctgattgactcgttgtaccttgccggcgtaggttagccttaactcgcgccactaattctcgatttgagaatggtttcgtcacataatcatcggcaccgagttcgaggccaatcactttatcgatttcagaatctttagccgtcaccataataattggcatatcatgcgatttacgcacttggcgggctacttctagcccatcaatcttcggtaacatcagatctaatagaattaaatctgggacagcctcttcaacttgttgtaaggcttcttcaccatcataagccgtgtagacttcgtaaccctctttggttagattaaatttaacaatgtcagagatcggtttttcatcatcaacgactagtatttttttagccatgtgcggatcctccttgaatgtggatgctttgccttctattatactcattttcagaaggcaattcaaaattaggtcaattcctaccaactggattaacggcattgttaatccctataacgattaattcttacgcgctcagtaactttattcaaaaaaaatacaaataactgtttacaaaagtttgtttaatatgctatgatatttaagtcgtaaggcgagacatcatatgggtggttagctcagctggcagagcaacggactcttaatccgtgggtccagggttcgatcccctgaccacccatcaagtatacatgataagtcgttatagaagtgcttaggcattgatataacggcttttttatttcttcttagcagattattattcacagtgaatacgacaaaccgtattcaaacccgtattcacgtattcaacaaaaatcacgcacggggcatatacataacttactgcaggcggtcagattagtggccgttttttaatttggactaacttcattaccaacgacctagattaaacatagaccgtcaaggggcatatagcaactactagcattagtttccgttgtaaaacgcgactgtattcattagttaaagggatgcccccaaatttggggcgatgttttaggggtaacggttcgttacgccatcacatttctatctaaaaacatctgctcaaagttgatccagtctatatctaagctaatggggcggaattttatgctcttcggacaccttatttttacctaacagaacgattatggtagcttattgcatggttcgatctaccgttctactttatctaaagtcccgtttcggtacctcagattgcttccatgcaattagccgaaaccaaaaatggattgggcaacatctcgttaaaatcaacggtatctaaagttaattagggctgatttttcagccgtactgtttctataattggctaagtatctgatgcaccatatcagtgcattagatgctgttgcaatatactaactcatctttaaggagtcatcaattctgtgactccttctttagggcctctaaaatctctaaataaattaatgttaggttttgttaggttttatgtccaacaaaaaccaacattattcattctctttagggtgtctgatttgtacggatagaaataaaaaaagggcattttgtctacttttgtctagttatatttaacaccaaaggctaccaccacgggtttaaagctaattcacgtaggtttacattggataaaccaataatggcttgtcctattcaattactaatccataaactagcctgcgaagttttgcgcaacctacttataaacaagcaactcctgattattatagctttcggcaaaagctaataacgccctattcttaaaccgattataactagatctgctatatcccatcgtgtccgctatatattgccttgttttatgactaccgtctaagtaacacatattaataatggatgcttgcgtatcctccattcctcctacaaccgcttgaatacactttaaatcacgcttagcctgctcatgtaagggatgactagtatttaccgtggctagccgtctaatcgtgccatagctctttaacagctttctggcgtttttgatacttgcttgttggtttattcggtcaatgatcatactgcttcactccttaagtattaattcaattttgatggcatcctaaatcaggactgcatccccgttatcaatgcttcttgaatattaataagccttcactagggtaggactcggcaaactctagcaaagcctgcttcttatgcttcttgaatgatgatgctgttatacctagttcaccgcagatataagccatggttaatttaccagcacttaaatactgcatctttggcaattccctgttaattaccgttaacttacttaaagccacgtctatgtactctagggtctgccgtgcctcgagtgttttaaccgcccgtttctcggttgtattatcactgctaaaagactttggcgcatgatcacaaataggactctttaaatgactagcactacctgcaatatgtttcactcaccaatatcgctttaataatctatctgcttgctgtctgctcttatcctcatcaatatcaaaaagaaacactctgacacctccaacatattaaaaagggatgcactattgccatgtactagcagtaacgcatccctttggttttccaatcaggtattaaactaatttagtcttgtctgttcgttcaatgaacaccaccttattattttgagttgtaacagttaagctcccataacttggtaactgatattctttgctttgctgttgatccttaataataattttgaccatcatatcacctctaaatatcaatcccaaattcttcagttagttgatgatgtttagcgaattccttgccacggtcgggcgtaatcgtacccaagtgttctggtggcagatcttttagtagtcttcgaatagtagtggtcacactggctgagtttttcttagctgctttgtgcattattaagtatcttgaacaacggtcaaccattgtgaccacacaagatctgccagttttgccagctacagtatccagctcccagtggccaatctgagtccgcttattggcagactcaggtcgttcttggagtgtatgcgatataggaatcttcccgcgacgttcctcataaccttttttatggcgcgatttaccatgatgtctaagctttctgatcacccctctggcacctcgtgatgaaagcttctgatcaaataaaccggagtagatgccacgataaatcgtggtgtagctgatctgaaatgatgaggtctctaattttaagcgtgcggcaatttcttctggtgaccattgtagatccaagaataaatgccggattaattgaagcaattggtgatcagaaagtagcgaccggcgtccacaatgagatttttgagcttcgtagcgctcttgagcaacagaaggtgaatatgccgatctatttcgcgataactcacggctaactgtcgccgttgctcgaccaattgtttgggcaattgaagtcagtgaagcctgattattatgcatcaggaatatcgtttcgcgttcactcatggtaagatgtttgtatgggctcatgattatgtgctcccttcgatggttgtcttcgcaaacaccattttacagggattcatatcatgagtctcttttgttgcacttaaagtataaattcaaggcaataaaaaacgttcaccgcaagtgaacgtttttttgacttacctatttagtttgtgaaacggtgttgcgggcgctaacacgtttgaagacgtggacggcaacccctaaaacggtaccgactaaggcagggactaaccaagctaagccgtagttggcgaatggcaagtatgcctgttcgaagccagtcatcgctttaccgaagctactttggctgacgaccgctggaaaagcagttaccatgtcgaaaaaagcaggaacaacggtaaagagaacaacgaatttatacacgactgggtctttgtggaacagtggtgaagcgactgacaataaaatcaagaccattgatagtgggtataagaacatcaacattggcgttgaccaagcgatgatttgatttaaaccgatattagcggtcaagaatgatgccagagtagttagaactaaccaagtgcggtagctaactttgggaaaatgtttatgaaagtcttgggcaaaagccgcaactaaaccgatcgccgtggttaagcaagtgacggtgatcaaagtggctaagatggcctgaccagcgacgcccatataatgattgacaatttggtcaaaagcgatgccgccattagcggaaactttgagtttacctaaggacatcgcgccaacgaagatcaaaccaacgtagatgacggcgatcattgccattgcgaagacgccggcacgggcagtgaccagcgcgacactgttagcgcgttttttgcctaaggtgcgaacggcggtaactacggtgaccccgaaggctaagccagctaaggcgtccatcgtgttataaccttgcaagaaaccattgacgaaagagcctgatgtataagcagcggtggcgtgttgaacaccggcgtggcccattggtgaactaaaagctaagaagaaaacgccagctaataagactaagaaaactggatttaataacttaccgatattgttgacgattttattttcctctaatgagaaaaagagggctaagccgaagaaaacagcggagaaaactaataaaccaactgtttggaaattctttggtactagtggcgctaagccaaccgtgtaggaaacggtggctgtccgtggtgtaccaaaaagtgggccgatggtgccgtggatcaagatcatgaataagagcgcgaatacgggacctaaaggccgcccaacatcatagacaccttcggaacgagtgatactgattgctaaaacggataataatggcaataacacaccagtgactaagaagccaagcgcggcaggcacccaattctgtcccgctagctggcctaaatgtaatggaaaaatcaagttaccagcaccaaagaatagaccaaaaagcattgaactaaccacgaaataatcgcgtttagtgagtttacgttcctctaacataagcagcactccttaaattttgtaggttgtggaaatgtggttcaaagactaagcgtctgttgccccacgtttaaatcatgagtgttgccattgctaagtcgactttagtaatggcggcgatcatcctgcgcgggaatgatcacgataaacaaaaaacgcccaaacctgaaaaattactttcagataaggacgttaataaacgtgttaccaccttgatttgccattttctcacgaaaacagcctcttcgggtacaagcaccaattggtacgaaataccctagctcgataatgggagcccccaatgaacgctcaaagatgattttctaattgtcgcaccttgacgtccttgcaccaaacgacgctcgcttaactggtgaatacaattatacttttcttatcacagcgtttaattttctcattgatttataatgtttctataatttaacgcgattttaagtgtttgtcaagggggtgataaaaataaatttataatttaaggcagtagtccatattgaattaacgtgtcaatgctatctaatacgatggtcgtattatcaaaatgtggctgccattttaggatatcttgcgctttttgggtactcaactgacgattgacgtgcactaataaattgccttcgcgggcggtctggttgaacaaagcagcgctgcttaaaagcaagttcggcatcgttttagtgggaatgttttgggcaatttgcggtcgtttttggcgaatcagtgctgctatctctggtagtgatatctgaccagcagcactatccagaaaacgttgcccgccagcgtgaggtgcggtcagcgcacgaatgtgtaagtcagcaacatcgcgcacatcgatcagattgagtgggatattgggaatcattttgggacgaccgttaagtaaatttttcaatagatcgaagctgccagaaacgtgggcgtctaatgctgggcccatgatcgccaccggattgatcgtagtcagttctaaactgccgtgactttgttcaataaactgccaggcagcctgttcggcgatcagtttgaatttttcataggccgataagcctttttcgttaggatcagtccaatcggcttcagtggtgatgctcgtttggtcgtgattactgaagccgatggcgccaaagttggcggtcatgacaacacgcttgacgtgggcctgttgggcggcctttaaaatgcgtaaaataccctcggtggcagttgtgtcgctgttcgggtcattggaaaaaacgggtgatgctacacttagcacgtagtcgatgttctgcatggctgtcgcccagccagcatcttgagtgagatcagcggcgacaaaacttaaattttcgcggtgttgcgcctgattttcttttagggcggtgcggacggtggtttgtttgtcgagttggcgtaaggtggcacggacgtgataaccttgatttaaaagttgtaagataatgtgcagacccagataaccgttgccgccggtaactaatacgttttttgtcatgatgttatgctcctattccctaatgagggttaatttaatcagtcatgtatgctatgccgttaagtagcatgatccttgtttatggcttctttttgtttataatagtccctagagtatactctagggcaagcaaaagaacactatttcaacgcagcgatttttaccgtagttgaatgatccgccgcgatgtacccaagggtctatccatggatattttgggtcctcatgatatccaagcagttgagtcaaagctaaacaatttaccgcgccggcaaactggctatcaaacacccaaagagcttttctccgctgcttccgccggttaagttaagtccataaaatatgaatattaatgaaaatactgatttaataggatttatcgtgtggctaatctgttcttgcaatttgggagtaaaattaatcattggtgctaaccactcctttacttagaacctaggttttatcaggttattaaccaaccccctatatattagggggccaagcgttcatatagcacgctcaacgcacatctcttttttttacataaaattccctaaatcggaaattcttatccaagttgataggcccgcgaaatgctacgttcggatatattaaacgtccaatttatttctttttcgttcttaatctgataaccagcgattaacatcgcgcctttcattgcaccatttaatacataaaagccaagtggtgtacgttcaaaaatatgtttaatctcgtatgatgaccgctgactgctaaaagttttaattggtttcaaggttgttagcacccaattaacgagtaccacttgttcatccgctgataattcattgaataatttaggcgcgttagtttcttcaaatttatctccaaccactcttagtaggtggcctcattccaatgattttcaaataaaaaacgtcatccaatagatgacgtttttatgtttatgcgtatagagccttttgattatatttaacatattgtttaccaaagctaacaaccattcctgatatcttcttagcgactggataaagcacaagcccaataatgaataatgccagacatgaaatcaattggaataccataaagcacactaagtgtttttaaaacatgaacgtttggtaatgttttatcttgctcccctctagaaaccgtttgacgtgtaacaaacaaattctgtgcaacttgttcctgcgtcaccccaacattcatcctagcttcctttaaagcattcccaactgacattttgccacctccgctataaacctaatttaacgaattaaccccacaaaaacaagcaacaaatctgttgcatccctgctattaaagcatttcaactcactggcagtcttttatttcccgggttaattcccgaaaacagctaacattttctttgttgccttttgggtcttcacgagttcaccttgaatacaccatctgcggaccgttttatcacaggtaatcagtgtcaccattttacgacctggtacatcatcgatgacttttacgtcgtatggactgattgaagctttgtaatcaactttgtacgtgtagactttttccatatccgttaagtagaccttatcgctgacgcgcacattttcaagtggcagaaagatgttttggaaagaatgccctgctaaagcataattgttaactgcacccatttgctgatcaggtctcattgtgcctccaccttgagccattgtgtcctctgagacgcctttcatgactggcaaggccatcttgacacttggaattgcaacttttcctaagacaatcacatcgcctttaatagcggcattcacaatctgttttgtatcgagtgaatcaaccttatcaaaatcaaagctcgcttttttatgttggtttttcttaatttgagcagctgtgacgtccatctgacgatgcgccatcattttaaccagttggttgcggattggattgatgaagaccaacactaatccaaccactaacagaatggctaataagccattaattaatcggtttcttgtctttttttgcataacagtttaagcccttcactagtatttacgactattgtaacacactattttatatttaccggctctaaatccttgtgattcgcaattaataacagcaacacataaaaacgcacaaccgaaactttcggctgtgcgtttgttgtttattttacgtttaagatgtacataaagaccacgaaaacaaagaataaaacatacataattggatgaatttctttgcgacgaccagctgtaatcattgtgattggatagacgataaagcccaatgcaatcccgtcagaaatactgtaagtcagtggcatgcctagaacgattaagaaggcaggaattgcaatttctaatttttcccagtcaattttcttcaatgattgagccattaaaacaccgacaatcactaatgcgggggccgtcacttgtgacgtgacaaccgtcaataatggtgagaagaataaactgaagacgaataacacacccgtcacaacggccgttaaaccagttcgaccaccaacagcaatcccagcggacgattcgacaaaggccccaactggtgatgttccgagtaatgacccagctaacatggccgttgaatctgataccaaagctttcccaacgcggggcatcttgttatctttcatgaagccggcttgttcagctaaaccgaccaatgtcccggcggtatcaaagaaggtcactaataagaaagtgagtacaacgacccacatttgaacggtgttgatatcgccaatgtgatttaaaccagctaagaaagtgggtttcaaacttggcgcagctgcaacaaagtgtgttggcaacttaattaggccactgatggctcccacaattgaggttagaagcatcccgataaagattgctcctggtactttacggaccattaaaataacggtaatgattaagccgaaaacagttaaccaagtcgtcccttgcgagaagtcccccaaaccaacaacggttgatttgttcgcaacaatcaagccaccaccgtgtaaaccgatgaaagccacaaacatcccgatcccagctgaaatcgctagtttcatattccgcggaatggcatcaataatgatttcccgtagcttaaagacagtaatcaacatgaagattaatgaagccacaaatacacccgctaaggccgtctgccatgacacacccatcccgataaccactgaataactgaaaaaggcattaatccctaaagctggtgcggttgcaattgggtatttagcatataaccccatcaagaaacacccgatcgcacttgctaatgctgtggctgcaaaaacagcccctttatccatccctgaatcacctaaaacgctcgggttaacgaataaaatataaaccattgaaataaatgtggtgaatcctgctaggatttcccgttgcactgttgaatgttgttcttcaatcccgaagaaacgacttactctttccataacgactcctctaaaccaactaattttcccactatctttttagtggtaatgtgtgtataatactgactggtgccaaacccatgagaatgaaagtttgttggcgtgtttaacgacacgtttagaaaacgaactttgcattctctttttttgtactctttttcagcaatacctaccagatagcagataagacatttgtttgttcacgatctggaccaacagcaaatgttgctaatggtaaatcaactaattcttgaattcgttcaacatagtgccgcgcattagctggcaagtcttctagcgtcttagcacccgtgatatcttcatcccaaccaggtaattcttcataaatcggtgtgcaacgttctaattcgcggagacttgctggataacgatcgatttgttcgccatctaattcgtaagcgacacagatcttcaatgttttaatcccagttaggacatccacacagtttaatgataattgggtcacacccgccactcgttttgaatgccgaagcacaactgagtcgaaccagccaacgcgtcttgggcgaccagtaacagtaccatattcatgaccggcttcacgaatgaagtcgccagtttcatcatctaactgagttgggaatgggccatcaccaacgcgtgaggtataagccttagccaccccaaccacttcgtcaatccgtgaagcaccaactcctgaacctgttgaaacgccgccggcagggtttgatgatgtcacaaatggatacgtaccttggtcgatatccaagaggatgccttgtgcgccttcaaataagacattccccttttgatccaaaacatcattcaaaacaactgaagtatcacaaacatattgtttaatttcttgaccatattgataatattctgcaaacattgtctcatattcaagtggttcagcaccgtagattttagtaaagagcgcatttttttcgtctaagttttgttttaatttagttgcaaagagttccttgtccaataaatcggcaatccgaatcccactccgagcggctttatccatataagctgggccaatcccacgattagtcgtcccaatcttttgatcacccttggctgcttcttgtaagccatccaatttagaatggtatggcaagataacgtgtgcccgatctgatactcttaattgactcacgttgatcccttgatccgttaaatatttcaattcagaaacgagggtcttcggatttacaacgaccccgttgccaatcacgctgagtttgtcactgttaaaaatcccagatggaattaattgtaaatggtaagttgtgtcacccaactgaatggtatgacctgcattgtcgccaccttgataacgcgcgatagcatcagcattttgacctaaaaagtcggtaatcttgcctttaccttcatcgccccactgtgttccaacaactactacagatgtcatataaacatactcctctattcgaatccgtcttcagatccgctatttaaaccctaaaactcacaaaaactattgtagcaacaaattatctcaaaatcaatataaaagacgaactttaaaatctctaatcagcctttattcagtaaaatcttaacgatacatataaccgataaaatacgaacgtaaataacgaacaatgatccctgttttgacaggcgttcattaaaaaaatacaatataaccacatctaacaccaaaggagctcatcatggtttacgtcagcaatatcattactgtggcaattgcctttccattcgtcgcaatcatcttaaccgttccactgttagtttaccactatcatcgttatggttcgctaaccatcctgcgtagtgtaattctctacagcttcatgttctatttggtagccgcttactgcttaattattcttcccctccccccacgctcggtggtcgctcatttaaccaccccgcgctataacttagttccctttacgtttgtccgggagtttatcaactcaacccatttcgtttggaccgaaccgagttcatacctcgcaacacttaaacaagcggcaaccattcagccgttgtttaacatctttttaaccgttccatttggcatttatttacgttacttctttaaaacgtctttcaaacagaccttattacttagttttacgttattcctattctttgaactcacgcaactttccggactgtatggtatttatcctcgcccttatcggttatttgatgttgatgacttattgctcaacatctctggcgggctgcttggattttatctccagcccttggtcacctttttcttacccactcgtgaaagtttggatcaagcagcctatgcgcgcggtcaaaaagtgggctacttccggcgcttattggcacttgccgttgattactgtgtgttaggcatcattacatttgcaattgctgttatctggcgattactaaaactacccaccattcattcagaaatgcttcagtactgcctggcaactggtgcttacttcttaatgctccccgttttttggcgtggcaaaacacctggtcaatctctcctgcaactacagattgtcgctgaccatcatcctcgttgggcgatcttctggcaccagctactcctatttttcatcgtcattcccagttttcaactctggcgcgtcaccctggatgccgctgttgctagtggccaacaacattttaacgtctatctctttattatcggtctctcactcttaccaccactgttattcaccggtaacttcttattaagttgggtgactaaacgaccacaattattctacgagaaactaacccatacacgggtcattagtagcattcaccccactcagcaaccttaaaaaagccttaaaatcatctttaattcctaaaaatggttaaagtcggatactttacagcttgaattggctatactaaaggtatcattcgctttgagaaaggattattgcttatgtttaataaattgaagttcctcatccccattgcatttactgctattatcggtctgagcgcacaaccggcctttgccgacagcaccacatcgtgggacaaacccgttgccactcttgggaccagcctttctagcacccaaaaagctgatacccttaagacactggaaaatgccgcgaacgtcacagatgtcagtgaactaacagtgaccggttccacacttgtaaaatatcttgatcaaaatcaacaaacatttaacgccaactcaagtgtctactcaagtgctttaattcaaaaaaatgacagcaataccggcatcaatgttaaaattatcgattttaatggccataacaacatcaccacaattacagccaaccaatataaaaatgcggccttaaccgccggcgtcacgaatgcgacaatttacgtgacttccgccattccaatcgatggctctggcgccttagctggcgtttacgccgctttcgctgaaaatggcgattcactcaaccaagcgcaagtaactgctgctcaagacgaaatgagcaccctcagcgatatcacacaggctaataaaggcaccgatggttattcagattcccaattgaataatgccgtcacaggtgccaaaaaagacatggcaagtaagggcaataatctgactgttaaccaaattactaccatcgtcaataatcaactcgaacaaaacaacctcaccaacatcatcaacaataatcaaaaacaacaaatcattaatgttctcgttaaaatccaagattccggtgctttaaattcggatgatttcaagaatcaagccggtaagttaatgaataatatccaaagtggtgcgaaaaacatcttcaataagctcaacacccaaagcaatcggaacttcattcaaaaactctttgatagcatggctaatttcttcaaaggattatttaactaaaggttgaaagttaatatttccacttaagccctgatctgttaggacttttttgctacaaaaatagacatgaaaccattcacatctgtatacttaaagcgtctaaacaaaaaccatacagaggagtttcatgcctatgtctactatacaatacaatgacactgatattcatcattcttttgctcatttttcaaaattggtccatctctccgctattttgcgtcgtgtcaatatccataaatcgcgcggtattaaaactgaacgcttatttgagtggttattgaccaccatctttaatcgttactccattttcagagcagaaaaggctaatgatttttcaaaacgaactgttcgcaattgtctaaatgatccacatattaattggcaacggctggttcagctattagcgatccatttgatccaatacgtgcaacattttaccgatccaagacggcgacaagccttgatcattgatgattcattgtttaaacgtgaattttcacgcaaaactgaattattagctcgtgtttttgaccacgacaaacagcagtattttaaaggctttaggacaataactttaggctggagtgacggcaatacttttttaccgctgaactttgccttgatgtcatcaagccacgccaaaaatcggtttgggcaccttaagtccagtgatcaacgatcactggccgcgaaacgacgtacacaggcaacccgtaaaatgaccgatgtcgctttagaattagtagatgatgcaatcaaatccggcatcaaggccaagtacgtcttattcgatagctggtatgcatcaccgcgtatgtttgcggcattgctaaaacgtcattgtcatgggattggtatgttgaaaaaaactaaaaaagtctattttcgttatcgtggccgagaaatggatattaaaactttatacactaacttacggcgcagtaaatggccaattaaggatagctatctatacagtccaatcgtcacatttgaagttgatggcgaaaaaatcccaatgaagttagtcttcgtaaccaaacgtggccaggctgatcaatatcttgtgttggcgaccacaatgactgacctaagaccagaagcaatcattcagatgtacggtcggcgttggcagatcgaatgttattttaaagtcgctaaacaatacctgcaatttgatcagactcaagtccaaagctatgatgggctttgcggtcacctagcaatggtcatgttaagctatgacgtccttgcattggcgcaacgtgaaaatacggacgacaggacgctgggtgacttattcttcgattatggacgaccgttgcctgatattaagttagtaagtgcgttgaattggctgatacaaacaattactggtctaggtgaaaaactcgacatggcggttgaaacattaactattatttttgacgaatttataaaagcattaccgagtagcctggccaggctactcggtaatgctcaatgaagtggaaactagtaatataccgtgccataaccgtttgacatcaatggttacggtctatttgatactttcaacctttagttatttaactaaataacacaaaaaagccccgcaaactgaagtttacggggctttttatttattcattatttcgttgttgcttttaaggcaactgcgtctgcagcaactgtggtactcattgcgttaaacttaatgtaatcaacagcgggcatgttggtaatgatcaccatcattgccgtcttcttaccagcagcagtaatttgattcaaatcaaccgttgctaataagtcgccatgtttgattgtttggccttcttcaacagcgactgcaaaaggtgcgccgtttaattcaaccgtatcaattcccatgtgcactaagacttctaaaccgttcgttgttttaatcccgattgcatgtttcgttgggaacacagtcataacagtcccatcaactggtgcaacaattttgccgtctgttggaatgacagcgtagccatcaccgagcattttttgagcaaaagttggatcatcaacattttcaatatcgatcaattcaccattagcaactgcatagaaaacatctgtttcacctgagttaatatcgctatcaacaggtgcttcaactggtgcggcagcttgttctggtgtacttgttgcgattggcgtattgtggttataaagttcttttaaagcatcagcaacaaattggacttctgtcccaataataatttgaatgtttgttttatctaaaacgttaatcccagcagtaccagcagctttaatcgctgattggttaacattggcagtgtcttctaattgtaatcgaagacgtgttgtacagttgtcaatcactttgatattgtctttgccaccgattgcagcgtagatccgttttgcttgaaccatgaatttatcatcagtagcgtctgtttcaacgccagcagtatcttcatcaacagcatcttctgcttcacgacctggtgtcatcaagttaaacttcttgatggcaaagttgaacccaaagtagtaaataactgccatgaccaacccttcaaccaataacatcaacggttggttagcaactgggtttttcaaacttaaaacataatcgactaatccagcactaaatgcgaaaccggctgtccagtggaagaaagcagcaacagccaatgaaatccctgtgaaagctgcatgcaatacataaagtggccatgcaacaaacatgaatgagaattcaagtggttctgtcacccctgtaaagaatgacgcaaaaccagcagctaacatcaatgaagctgttgctttacggcgttctggacgagcatttttgtagattgcgtaagccccagcaggtaagccgaacatcatgactgggaagaaaccagcttgatacatccctgtcttaccaatcacagctgaaccattcgcaagtgatttcgcaccacccaagaaattcccgatatcattaatgttagcaacatcaaaccagaacacagagttcaaggcatggtgtaatccggttggaattaataaacggttgaaaaagccgtatagaccggcaccaaaccaacccaatttagaaattgcttcaccaaatgacactaatactgtaaagacggctggccaaacaaagtacaagatagctgaaacaaccatcattgcagttgccgccataattggcactaaacgtttcccactaaagaatgagagggccattggcaacttcacgttgtggaagcgattatacattgcagccgcaattaagccggcaataatcccgattaaaacattcccttcaatcttaccaaaagctgggtttactttagcgatgtctgataaaccttgcatcgcttgaattgaagcaggtgccaagattgtcttaggcactaagaaagcgactaaaccagcaagtgcagctgcaccatcttgatccttagacatcccgagtgctaaaccaacggcgaataataatggcaagttatttaaaattgcaccgccaccggctgataagaaaattgtaaagacgtttgcgtttgaatcgccattgccaacccagttcgcaatccccattaaaattgcggctgctggtaaaacagcaactggcaacattaatgaacgacccattcgttgtaagtaattcttcataagtttttctccattcatttttttcgttaatatgattaaatcattaatgtaaacgataagcaagcgcttaacaatcggtatagacctttataaatagcggttgaaacggtttcatgcacacaaaaatattggtctatacctaaaagttaacaaatgatatctgattcaccaaataaaacggttgcattcacctaccacactctctatactgagggtacaaattaatcgctttgcactaggggtgttcttagaagaactgagataggtttgtacagcctgatccctttgaacctgtaagttcagacttgcgtaggaaagtgcctttctttagactactcacaccacttttctatgcattcgtgcatcgttaagtgatttttttagtttttaatgaaatcttgaaggacaaagctgttgaagtgagtcctgttacatcagacgaatatccccaaaaagccttccgtccaagacattcaattatggatttgacgaagattaaagcaactggttttgaagtaccaacctggcaagatgcattacaaaaatttatggcaaaaatcgattagtataattaaaaaggtgagtaatcatatgattgctcaccttttttaattatactaataacgcactaaacttcttctgcaccttaaatttaatattattagccgttcgccgtgtgatgtttagatccacggcgatttcttttaggctggcattgtagaaatagcggaggactaagaagcgtttttcgcgtggggtacagacttgatagagacgttcgaagaggtcgttacagatggcggcgtcttctgggttacagtatggatcagcaacctggtcgagatagtccatcaccgaatcatcatcgtttgcccggttaacgaaaccaattcgtttgtcgcgattattatccttgcggaaagtcatcataatggcccatttaacggcctgatacgcataaaccatgaagcggtgggtttcgacttcaatattgcctgggaaatgatcgtaggcttcgacaaaggcgatgacgccaatttggtagagatcagcaaagttattgcgctgccgtggaacgtggagatctttgagaacaccatagatgagggtgtcgtcttgtataataaaatcaaaggcagtttgtaaatctgattgggtcattgttaagcatcctgtctactatgagctcacagtgtgaattaccggtaagttcactatagcgggtttgcataaagaaggataatcgccgattttagcggtaaatcaatccgtttcagctttaatttgcgcaaatgcattgaaatacaaatgaaaattattgtaaatagcgacttcgggttaatttataattggcgtaatttttgaattagtgctttaacacttttgatatagcactgaatgtcaaatacgctgaattcggggtattcatggattacggcttggtaaatgaaattttccttatgcattttaagtgcgttgagtaatccaagtagttcagtagctgttttcggaacattcgagcacagatggcaatggcaatcatcgaagcgatggacgatgcttggcttgaaacaagtcttgagcttgatttgatagccgaaattagtggcacacacagtgagacagccaagttggactttgccaatggctgcacattgatgaatttcagtatcgatttgacggcctttataagggaggatacaggtacagtcatttagcaatgtaacgtagagatggttatcgctaacttcgtaatcacggacgtagtggagcgctaaccacggtgcgttttgatgagccgtgccacttaatggtaaatactgatattcgccattgatgtgtggaatcttacgataccaattgaaacaatggcaaaggtaccggggttgtgagaagtccatgatctgatggcgattataagcgcgcattagttgccgggtagaacgcggactaatttggagaccggttatgcggtctaacacaagactttgcgattttttatagggaataatcaccattgtgtcactcgtaatactagtttggtaagaacggggaattgacgattgatccagctcacagaagttataatcaatgccacgtttgatgatgagtggcacaggaagacattcatgggatgtattgacatgtttgggatgtagtagaaacatcgaagacctcctttattgttaacatcttgagaataccaatgatgggaatcgcttacaaaacaattgtgaaaagattgataaaatcctaagtgcttgttaatcttttcctcattttcggcatataattggtgcaaatccacttttttatggcatactgttattagactataagttatgggggattttagcagatgaaagtacgtaaagcagttattccagcagccggattgggcactcgttttttaccagctaccaaagcgatggcgaaggaaatgttgccaattgttgataaaccaacgattcaatttatcgtggaagaagcgaaggcttcagggatcgaagatatcttaattattactggtaagggcaaacgcccaattgaagatcactttgattcagcaccagagttggaacaaaacttgaaagccaagaataagaccgctatgttgaagatggtcaacgaaacgactgatatgggggttaacttgtacttcattcgccaatcacatccaaacggattaggggatgcagtgcgccttgcaaaatcattcgttgctgacgaaccttttgtcgttatgttaggtgatgacttgatggaagataaggtgccattgagtaaacaactaatcaatgaatatgaagaaacacatgcatcacaattagccgttatgaaggtgccacataatgaagtggacaaatacggcgtgattaacccagaaaacaaagttaaagatgatttatacaacgttaagaacttcgttgaaaaaccagctgttgataaggcgcctagtgatttagcaatcattggtcgttacctgttaacgcctgaaatttttgatattttagaaaaccaaaaaccagggcttggtggtgaaattcaattaaccgatgcgatcgatgaattgaacaagacccaacgcgtcttcgctcacgaattcaaaggccgtcgtcacgatgttgggaacaagttcggttacctagaaacaagtatcgaatatgggttaaaacacccagaagtgaaagatgacttgaagaaatacattatcgacttggcagaagaattaaaaaaagacactaaaaaagaaaataaataacctgtaaaaaacgttcaaccactccgtacattggagtggttgaacgttttttgttgttttaaatgataagcccttcgcagtgatccacctcatgttgaataatctgtgcaatccagcctgagaaagcctgcttgtgcggcttaaaggattggtcttggtaagtgacctcaattgtttcataacgcgttgtagggcgttctccgtttaatgagaggcagccttcagtcgtttgataaggtttggcttggcgcacaatctgtggattcacaagaatcacaggtaagacgcccatttgaacgatgataatccgtttattgatgccaatcatgttggcagccattccgacgcaacgttctgtgttggcttgtaaagtatcacgtaaatcggtcagcacatcggtatcagctggtgttgctggaactgctttttgagctaagaattgcgtgtcacgcataatgggtttaatcatagtagactccttgagtagtagttcttccattatagcagaaaataaactcattcaattctcatttagtgaaagtccgccttatctgcgggcttttttaatgcgattatttagggattagagtctgcttttcaatattgtggtaaaaaattcgacaaatttggattttatgcttataattattaacatactattataaaacgtctaatctaatcttaataacgcgttaagagcgatgagagaagttggtcaggcattaggggaggatcacatgaagaaattactcgtatttttaggcagctgtttactcgcaggcttatttgtatttgggagtcaagtgaataatcaggttcaagccgctgaaaaaacttatgaaatcggtacggatgtgacctatccaccattcgagtttgcgaatgagaagaatcaatatgtcggtattgatattgatatcatgaaggcagttgcgaagtccgagggctttaaagtgaatattaaaccgttgggattcaacgcagcggttcaagccgttcagtcggaacaaattgacggcgtgattgccgggatgacaattacacctgaacggcaagcaaaattcgatttcgctgatccttactacaagaccggggttgtaatggccgttcaaaaggacagtaagattaaaggcttagaagggttgcgcggtaaacgtgttgcgattaaaacagggacttccgctggggcctatgcgacggccaaagcgaaagaatatggctttaccaccgttacgtttgatgattcagataatatgtataatgatgttgtgaatggtaattcggcagcctgttttgaagacgagcccgttatgcaatatgggattaagacgggcttgaaactcaagattgtcaccaaacctgctcaaggtggcgaatatggatttgccgttaagaaagggagcaatcctgaactcatcgctaaattcaataaaggtcttgctaaattaaaagcaaatggtcaatacgacaaaattaaagcaaaatatttaagtacagaatcaactaaaaaagcaaccgttgatcacagcttttttggattattgaaagaaaataaagatgcgttgttgagcggtttaggccagacgttattattaacagtcattgcgattttcttcgcaacgattttcggggttttcttcggattactcggcgtattacctaaccggtttgcgcgtggcgtttcagatacggtcatctatattttccgtgggttacccctcttggtgcttgcattattcatctatactgggattccaagtttaactgggcagaagattccagcgattgtggctggggtcatcacgctgatgttcaatgaaggggcttatactgcagcctttgtcaaagggggcattggcgcggttagcaccggacaaatggaagcagcgcggagtttagggttaccatatggtaaagcaatgcggcgcgttgtgttaccacaagggatccgcattatgattccatccttcattaaccaattcatcatcacattgaaagatacgtcaattttatcaatcatcgggattctcgaattgacacagacgggtaaaattatcatcgcccgcaaccttgaagggttcaaaatctgggcaatgattgccttaatctatctgatcgttatcacgttactcacgtggttatcgaagtacattgaggggagaatagataactaatgaatagaattgaagtgtctcatcttattaagaattacggcagtaacgaagtgttaaaagatttggacttaacggtcggtgataatgaagtggttgtcatgatcggcccctcaggttcaggaaagagcacgttcttgcgctgcttgaatcgcttagaagaacccacgagtggtgagattatcgttgatgggtacaacctcagtgatcctaagagtgatttgaatcgaattcgcgaaaaaatcgggatggtattccaacactttaatcttttcaaaaatctaacggtcgctgaaaatattacactggcaccagtggaactcggtaaaatgacgccggcagaagcaaaagaaaccgccaagaaactacttgaaacggttggtttatcagagaaattcgatgcaaaaccccaatccttgtcaggcgggcaaaaacagcgggtggccattgcgcgtgccttagcgatgaaacctgatattctcttgttcgacgaaccaacatcagcgctcgatcctgaaatggtcggcgacgtgttggccgttatgaagcggttagccaaagaagggatgacgatggttgtcgtgactcacgaaatgggctttgccaaagaagtggccgaccgcgtcatcttcatggcagatggacacattgtcgaacaaggcacaccacaggaaatctttgacaccccacaaaacgaaagaacaaaagacttcctgaacaaggtactaaatgcatagcgtgtgtttcaaaaagcacgtttaacgccaaccaaaaaagcggcccaccattacttggtgagccgcttttacgattcttaggtctttagaatgttagaatagaaataggaactagtagagaaaagagggattacgatgcgattaggcttaaaagcagggattaacgatcagcaaattgctgatcgaatgcagtatcagccaacgtattttgaatttcatttaacagccgaagatgtcacgccaactgggctagtacgcttacgcgaaaaaattcgttatgtacgcagtcagcaggttgaacgaattattttacaccacccaatgagtttcgaagggcatcatattgaactgtcgatgaatgaagcaagttcgccagcccgataccgctttttatggcaatcaacactcgatttattgcagttagcgaaagctgaagatgtccaattattggtgcatggctcttatgatgatccaattgaagaattgacgacgggttacggtaatattacggatgccattcgtgttttgttcaagcgcctcgattatttacagcggattggtggacaaaatattatgttcgaaaattcaatttcaccgattttctattatggcaatccgatttttgatcaggccatctttgataaaggttaccgcttagcgtttgatacgagtcattgttttatcaagttgcagggtgatcagaatgctttcttgcagagtctggcaactttgcgtgagcacgttgttcattatcatctggttgattcgatgggtttgaagcatgatgggttgcaattagggactggcaaaattgactgggcccgcgtattgccattgttaaatcctgatgccagttcgatctatgagattcaattagccgatcaaaatgatgcacgagaaatgattgcgagtcatcgttatttaacgcaacttgaacaaacattatccgagtagaattttgtcagcagcaacgcgaaaaccaaacaaaggatagtcccccgtctttgtttggacatacatataatgttggtagtagtttttttgatttaataataggctaaattcccactgcttcagcggctttttgtctgcggcctttaactgcagtaatagtcgtggctgttcgtcaacgacggcgagctcaaagtgggcgataggttggagctcttcagggccttcgaagtagatgccatcgtttttgggtgtatcagctaatagctgtagtaagtcaatgacgcgcatgataagtcgtcctttctaatagtgcgaaaatcccggcaatgatcagccaacaaacacccgacaagctaacggcgatggttaggataattgccattggtgttagaacaccaatgagccaagtcgtggtgttgactgttggcacaaatgaaaacagaccagtaacgaggcagaccgcgatgactgtggcaataatccctggaatcgtacctttaaaatcagctgcggataagtcataaccaccgatggcaatcatgctagttaagattaaccagagcaagagagcacccggttgcgtcgtccagagctggctgaataagggaccgatggcgtttaactgccaagtgggatgttcagcaaaggtcatccacgttgcaaaagtgggtcgtgctaataaccaagtcagtccgaaaatggcggctgaacaaccaaaaatcggggcaatcccaatccagagattaccaattgttggccaaagacggccgggatggtatcggtgattgacatggccaagcgaatgatcgggattatcccgtagatttaattttaagagttgcatatcgataatttggtgttggaagattaaacaggcaacagcatggctgagttcatgaatcacagtgcctaggccgccaattaaaagttgtgagtaatcccaccaatgggctaagcgccgtttagttgaacgattgattagtgttaaaatcccggcaaaagctagtggcagcgcaattaccagtaaacaattaagcaacattgattgcaatatttgcgataagttaaatggattgggcatgataactcctttgaacgactttatgtaagcctacaccaaagtttatcgcggaaacaagggttgttaatcaatttatgtaaaacgcaaaaaaagcccccaaatcagattcgatttgggggctgtatgctgcttaattatttgtcagaaaagattggtgtttcaatccgttcaacgtatttggcaccaactggttctttgtagagttcaattccttttttaataaacatattggctgctgcgattttagtcatcgcacttctaactgtttcggcgtctaagttgtcatcaatattgtttaagcgcaatacacgactcttagcatcactgtttttaaattctaagcaaagttgtttcatcttgaattcctcctcaaagattggtatgttttttatttagcgatataagcagatttagtggttagagtagctgttgcaaatgtgtcacctgcgtggagacttgcgagggcttcgccaactgcttggatttccgtggcttgaacgtcttcttttacggcggtcatacgacgttgtaaactttcatttggatagtctgtattttgtaattcaaaagcgatcgatgttgctaaccatgatgtttgcatgtggattcctcctaaagattagttgtaagcgtcaccggtgaatgacttacgctaatgagtaatgcacgatgccgataaaatggtaaaataatctcagcttaccaagcggatttctaaaaaaaagttaaagaaattgtgaattaccagacgttgcatgaaaatttagttatagtaataattagacttatagatgaagagggatattatgcaagaagtggttattatcagtgcaaagcggacaccgattggtaaattggggggccaacttgcaagtttaagcgcggttaaattggggacagttgctgctaaagcggcgattgaagcagccgggattgatccaactcagattgatcaagcaattttcgggaatgtcttacaagccggttctgggcaaaacgttgcacggcaaatcgctttgaagagtgggatgacacaatcaagcacagcaatgacagttaatgaagtttgtggttccggcttaaaagcgattcggttggcgcagagtgcaatcgtcatgggcgatgctgacatcgtcttagttggcggtacagaaagtatgtcacaagcgccttatttgaataaacaaatgcgttttggtagtaaatttggggatcaaacaatgattgatagcatcagtagcgaagggttaaacgatgcgtttacgcaccagccaatggggattacaggcgaaaatgtagcagctaaatacggcattacgcgtgaaatgcaagacgcttttgcactcgcttctcatcaaaaagccgcgcaagcgacccaagctggttggtttaatgaagaaattgtgcctgtaacggtgcaacaacgcaaagcaacgcttgaagtacaacaagatgaaggtatccgcccaacgacaaccatcgaagcaatggcgaagttgcgcccagcttttcaacaagatgggactgtaacacctgccaatgcttccggcattaacgatggcgcttctgccatgatcgttatgagcaaggaaaaagctgctgcactcggattagtttaccaagccactttggtcggctatcaagaagtcggtgctgatccagattacatggggtacacgccggtcgatgcaattcaaaaattattagcgcaacaaaatcaaacattagccgatatcgatttattagaaattaacgaagcgtttgccgcttcaagtgtggccgttcaaaatgggttacaagtcgatcctgctaaagttaatgtggccggtggcgctattgcgttgggccatccaatcggtgcttcaggcacgcgcatcatgacaacgttaatgcaccaattgaaacggacgcaccaaacaacagggattgcttcgttatgtattggtggggggttaggaattgcttttgaaattcaattaaatgaggcatggtgtaatgaaaaagcctaagttctatcaattaacgaaggatgaacgtttagcaacgcttgttgaacaaggtcacctaagtcagacggatgctgattgtttagcagctgcagaacccttgtcagatgagatcgctggtaatatgattgaaaaccaaattggccagtaccaagtaccgcttggtgtggtgcaagatttattagtcaatcagcaagtctatcaagtcccgtttgcgatcgaagaaccatccgttatcgcggcggctaataatgcggctaagatggcacgagctaatggcggctttgtgactgaacaactgacgcggctgatgactggtgaagtcgtgttagagaagctagttgacttagtagcggctaaagcttggattagtggcaacaatgaccatttatttgaagttgcgcgggctgcgcatccatcaattgttaaacgcggtggtggtcttcaaaaaatcacgccgacgattattgacgaccgctttttgaaacttgaattgcaaattgataccaaagaagcgatgggcgccaacattgtgaacacaatctgtgaagcgatcgcacatgctgttcaagaacagttgggcggcacccttttattgagtgttttgaccaatgccgcgtttgaatccgtggtgaccgcaagtgtgacgattgatccagctaccttaacaactgcgatgcttgctggcaaaacaattgccgaaaagatgattgcggcgagtgactttgccaaaatggatgtggcgcgcgcagcaacccacaataaagggattatgaacggcatcgatgcagtggtgttagcgacgggcaacgattggcgcgcaattgaagccggcgtgcatagttatgctgctagaaagggtgcttaccaaccgctttcgagttgggaatggacaactgatcagcaactacgcggtcgaatcgaactgccactgccagttgggatggttggcggatcgattggtattctaccaaccgtgcagattaatcagcgcttgttaaaagttcagaatgcgcgtgaattagccggcattatcgcagctgttggcttagcacaaaattttgccgcgctcaaagcacttgtgtcagacgggattcaaaaaggacacatggcgcttcaagcgaagtcgttggcgattgccgctggcgcaaccgagactgaattaacgcaattattaccattattattgaaagcgacacatttaaatacagcaacagccaccgagctgttagcgcaactgcgtgctgaaaacaaatagattggaagattattatgcaaatcggaattgataagatgggcctttttacgcctaatacctacttagatttagtgatgctagctaacgcgcgaggcgttgatcctgacaaatacacaattggaattggtcaagatcaaatggcaattgcccccctcagtcaagacagtgtcacaatggcggctaacgcggctcttgaagtgttggatgatgataatcgtgattcaattggtttattaattttaggcactgaatcaggaatcgatcagtcaaaagccggtgccctttatgtgcaacgcttattaggattaaaaaatgcccgtgcttttgaaattaaagaagcttgttacggggcaaccgctggtttgatgaccgcttatgactttgtagcggcacatccagagcaaaaagcattagtcatcggttctgacattgcccgttacggtttggatacaccaggtgaagtgacacaaggtgccggcgcggttgcaatgatcgttagtgcagcaccacgtttgttggcgttagaaccggcaacggccattcacagtgatgacattcaagatttctggcgccctaattattcaaaagaagcttttgcgcgtggcaaatattcaactgaacaatacatcgaatttttccaagcaacttgggcagactatcgcgctcaaactggccgcacaatctcagatttcaaagccttaacgttccatttaccatacacaaagatggggttgaaggcattgcggacaatcttgccagaagcaacggaaacagaacaagcatatttattagaccgttatcaagaaagtacattgtatagccgtcaaattggtaatatctatactggcgcgttatacctaggcttcctttcattgttggaacaatcaacgcaattggcagccggcgatcgaattggtttattcagttacggttcaggtgcaatcagtgaattcttcaccggtattttgcaacccggatttgaaaaacaattagccggtgcggaccacaaagcaatgcttgctgcacgacgtcaattgacgatggctgaatacgagaatcaattccaagcagaactaccagaagacggtagcgaatatgaaattgatttggcaatggacaacgcgccaatcattttaaaaggtgttaaggaacacgaacgcaattatcaagttagagattaataaaaaaacagctatgtatcctaaaaactgccattaacagtattgttaatggcagtttttttagctatttctgataaaaataacaagtcagaaatgatggaaaaacttttttaaatttaagagcattttgattgtatccggtcacagaaggtgctatattaatggtgaggaaagatagcttggtaagtgaaaccaagttagctttaaatagatttaccactttaaaacacaagcaccagatttgaatgtacgacacatcaagatttaaagtacgaaaaagaaattgcaaggcgtggttccaatggaaacataagtgtaactcttcgtagtattaagatctaagtatatcggaggctgatgtctgttaaagaatatcgctcaagtagtaaacacgaatttaatcgtcatcgctaaaactgcacatgcgggtcaaagatagacgaccaaactagatcgagtgaaacgattagcagtgggctagaccaacgattaaaaacaattgaataaagtatgaggtgtaacattatccagaatgtaaaacagaatcagctcgtaacaaccaagctatcaacctcaacctaggggattcaagcatatcaaagcttgaatccttttttttatgctcaaaatacaatataaatagccattcactatagataacaaatgaatggctttatttttaattaggcgtgggcttgcactgcctcaatcaacgcgtctaaattattcacaatcgtgccgttttgtttaattaagccggttgtgtaaaggtttaagtaatggaattggttttcggcgatctcttgtaaagctgctagtttttgcggatttgtagcaccttgttggcggctgtcggtgtataatccgatcattggaatttggcgaccgtatgccacaccgatttcactagcaacgccaacatcgatggtaggaccatccaaaacagcaatgacgagatcgctagcaacgagttcgtctgtatcggcttgtgcgatcatttcagagctggcataagcattcttgtcattaattgcggcgttttcttgtgggagatagatatcgacaccaggaatcgattggcgcagttgagcaacaaccttagcgttataatcaaagtctgctgctgagaatagagcgtttgcgaaataaattttcataagaattcctccaagttgattttctttattgtatcaaattagtggtgaaatgctgtacaattaagttaatcagttttggaaggggattcacaatgcgcgagattcaagaaacaccagggcaagtaacgtttaagtcagcttggcgagattattttaaaggttattttgattttacggggcgaacaacacgtgcgggttattggtgggcgatgttgattttaatgattgtttggttcatgccatttttcgctttgctatttgcacaagctgcaaaggtgcaactgaagatgagcggtgcattagtgctgtacataatcgttatcgggttgcttggggtactcacgtttattccaacgttggcgcttagtgtacggcgttatcgggatgttgggttaaatggtcgtggagcagttgtattgtggttattgaacgggtttgcatcccgttttgcatcgggcaatcaggggcgcgcatggacgttaatttcggcgttaagcggaagaaagtggttgtgaaagcacgtttcaaaaagagtgcgtcacaaccgaaacggtctgagcattaaaaaatgagagtgtggcataagtcgggtatatcctgaggattaacacagaatggtgaaggattgcttcaagcaatcgtttgccattcagggttaaccggaaggatatgacttatagaacgcgtttaggcgattaaagtccaaataaaaaagcggtccatcaacaaacacatgttgatggaccgcttttttgcgttataggtcgcgttttagtgttaatgttacaactgcttcaactcgtgccgtttgggggaacatgtccaatggttggattttttccacttggtacgtatgcacgagggcttttaaatcccgtgcaagggttgatggattgcatgagacgtagacaaatttcaatggccgactgtctaaaatggcatcaattaatttttgatctaagccagtgcgtggtggatcaaccaccaaggcagttgggacgaagccattatccaaccattctgggaggaggtcttcggcagcccctacggcatattcaacgttttgaatgtcgttgatggctgcgttgtgtttagccgcttcaattgaatcggcaatcgtgtccatgccgcgcacttctgcgacttgattggcaagactcaagccaattgtacccaccccacaataagcatcgacgaggcgatcttcaggtgtgagatcaagtgcatcttgaactaagttatacatcttagccgtttgaactggattcaattggaaaaaggcgcgggcagtcaattcgaagtgaacgccgtttaaagtttccataatcgtttcttgaccagccagatgaatcgtttggtcgccccaaacgagcacgtttttccctttgttgatattttgcatgattgaaaccacttcgggcaattcagcttggatggctgtaatcaatgcgtgcttttgcggtagtttaggggagttggtaatgaaggtcagttgcgcttcaccggttgaaaaagattcgcgaacgaccaatgtttttaaaatcccagcattcttagtttcatcaaagacgggaattccgagtgattcgactaatttcaagacggttcggatgattttcattgttaaatcggtttgggttgcgaattcaggcaaatcaattaaagtatggctacttggagcgtataagccagctgctaaatgaccgtcgatttcgcggacttggaattgtgctttgttgcgataatgccagggggtttccattccgactgtatcggtaatattgtatttggcgtagccttgtggtttgaatttttcaagcgcttggacgacgacgtcttttttgaaggcaagttggccaggatagcttaagtgttcaagctcaatcccaccgacttggccgtaagtggcatccttaggggtaacccgttgtggtgaagcttggcgaagtttgtggacttttgcttcaatgaaacgaggggcaacgttggtgacttctgcgacaaccacttcttcaggaagtgcgcctggaataaagacaattttgcgtttgtaatagccaatcccttcaccattgatgccgattcgtttaatcgtcaatggaaaacgttggccgacttcgacttggtttgtttgttctggcatttaatccgctcctattaatataaaataatgatactcgtttttctcattgcattcagtataacagacttagcactgaaaaatcgcttcaatagtgggaattaggcagtgacttttgtccgggtgcgccatttatgctatgctacaggaagtcaaagtaaggagcgaagccacatgaatttttgggaacgaaatcaatttttaatcgccatgctgattgtactcggaattggcgtttatgccttccaacacaagagcttaccactgatcatcgggactttagtgctcgccgtcgtggtcattggatttaaagtctatttaaacatcaaagcaacacgtaacaagggagaataacatgccgaagattaccaaaataacggcacagaaaaaatcaggccgttataatatttttatcgatgagcaattcgcttttggcgtgaccgagagtgtcttgattaaataccgtttagcgaaggatttagagattgatagtcaactgcaacgcgacattcaaaaagacgatgataatgccaaagcttatcaattggcgctcaattatctgagtcaccaattgcggacggaaaaggaactaacgcaatatttacgcgaacacgagatcactccagaagggatccagactagcttggcaaaactacgcgagttacattatatcgacgatcaggattacgccgatagctacgttcgtactgtgattaataccgcggataagggccccaaagtggtccgccagaaattaatccaaaaaggtgttagtgctgcccatatcgatcaagcacttagtcattattcagtggatgatcaagttgcggttgggttagcagctgctaagaagttggcgaagaaataccgtcatagttcattctttgaacagcagcaaaaagtcaaacaaggtttaatgcaaaaagggtttggcggtgacagccttagtttaattattgaagcgttggcccttgaagccgatgaagatagtgaagctgacgcgcttgctgaacttggtgcaaaaaaatggcgccgttatcgattactcgaaccacgagaacgccggatgaagatgcaacaagcgttgtatcggaaaggatttaatattgatgcaatcaaccacttcatcgacgaacaagaactatcagatgacaccgagtgaacgggacgcgtttcaaaccgcgtttatgacttggtatgatgaaaatcgccgggacttgccttggcgccagaatcaagagccctatcgtgtctggctatctgaaatcatgctccagcaaacgcaggttcaaacagtgattccgtactatgaacggtttttggcgacttttccaacggtggcagacttagcggccgctccagaggacttattaatgaaaacgtgggagggacttggttattattcgcgcgcgcgtaacttacaaaaagcagcgcgccaagtcgtcgacgactacaatggccagtggccaacaaccgcggctgaattagaaaagttagccgggattggaccgtacacagcgggcgctatcgccagtatttgttttggcgaagtcgtcccggcaatcgatggcaatgcttttcgggtgttcagtcggttattgaaaatcgatgctgatattgccaacccaaagaaccgccacattttttacgatgcgattttaccgctgattcccaaagatcgtccaggtgactttaaccaagccgtgatggattttggctcgcaagtttgtacggcaaagaatccaacggttggtgagacggcgttagcaccgtttttccggagttatcaagatggcaccttattggattatccagtcaagacgaagaaagcaaaacaaaaactagttgcgatgtttgcagttgtgattcgctcgcaaaagggcttattatttcaaaaacgaccgagtaccggtttattagcgaacctgtccacttatccactagtcgctgcggaagacttgcaagtaactgacgatgaattattgacaccggaagaacaactagctcgtatcgaagcttattttaaagaggcttttgcactagaattgcagcaattacatgaatcaggtttaaaacccgtggtgcacgtttttacacatcttaaatggacgattacccttttagaagcacaacttgcagcagatgccgacctcgcctttttcccaggccaatggtataccgaggcacaattagctgacgttgcattaccgactgtgcaaaagaagttagcggcacgtttggcaaccaattaatggtagaaagttttaggtaaatttgcgagtctttgctataatgatagatgattatgaataataaccttggaaagctgggtatgtcgatgagtattcccaaagaaggcgactatatagcgattcaaagttataaacacgatgggagtttacaccgcacttggcgcgatacgatggttttgaaaaccagcgagaacgcagtcattggttgtaacgatcataccttagttacagagtcagacggcagaaagtgggtcacgcgggagccggcacttatttatttccataagaagtattggtttaacgtggtggcaatgattcgtgagggcggcgtttcttattattgtaatttggcatcgccgcatgtcatggatcaagaggcgcttaagtatatcgattatgatttagatgtgaaggttttccccaatggcgaaaaacggcttctagatgtcgatgaatatgaagcgcacagtgcgcaatggcattattccgccgaaactgatcggattttaaaagccaacgttaaggttttggttgattggatcaacaatggcaaagggcccttttcgaaggaatacattgatatttggtataaccggtatcaagaattggcgcaccgtcgttagaacactatttagtctcaagcaaaaaagccccagtcattgattgactggagcttttttgtatgggttaatcgttttcgactgaagtatcttgttgaatcgttaatgttttaaagccgatgccagcaccgatgctgatggatagcaaaagcgcgaagacgcaccagccgagtaaactaccagcaatgatgttgagtggtaagaagtggcgtaacagataggttgcaaggcagaaaagaatgccatcaaaaatgaagttagcaatcttaataccaagtgaacgttctactaggaagaaacttgttaccattttaagtgtttggttaggggctaagtcagccataatcgtcaacggtcgttcgattggaactttaataaataacattagggtgctgctgattagagcactgaacaaggtgcgatcccaagtggcactgtgaatcacaagactgtcgtaagccgttgcggcaatcgtaatgacgagtagataagggataatgaagaaaaataagtggacaagaagtgatttttgcttaggcatggtaacgtcctttctgttattaagctgtgttcattataagtcatttagtggtgaaatgacaattagtcagttaattttttaaccatttcttgatgcataatcccggcatctaggaactgtggtttggcggttgcttgaaaattaagttgcgtatagaacggtactgcacttaattgagcatttaaagtgagcgttgctttgcctgattcccgagcaaaaacttcagcggcacgcatcagttcttgaccataaccatgatgccgtgctgaacggctaactgcgacacgttgaacatgataatctgagtccgcttcgatgagccgcaacgtcacaacggcttgatcagcaacgtagccgacaaaataaatcgcttggtcttcgaattcatcaatctcaagttcagcaggcacgtgttgttcaacaatgaatacggcttgccgaattgccaaactatcttgataaaccgtactttttaaatcacgagtttgtttcactaacattaaaaaaccacctcttcaaaaggaataatcaatgtgtatcgctataaaatttggtacaataacaataatcgttacactatgatagcataaaatgcgttttgtgtgacataggcacactggggggatactgcatgtttgatcgtttacgccaatcaaaactattattttggtcaattgagcttttgattttggctgtgttaatctttgtttgcaccaaaattagtttcttatttgatccaattggcacctttatttcaactttatttgggccaattattggcgcgggactattattttacctgtttaacccactaatcaatctgttaggtaaactcaaaatatcacgcaactgggcgattacgattatcttcatcgtcttttttggcggtttaattttcattgtagccactgtgattcctaacttgattaaacaaatcacacagcttgtgacgaacctaccagattttgctcatcgactgcaaaaagtagcggatgatttatctagcaatccgcgcttgaaaaacattgacttcaataaatacgtcaatcagttagatttaaaaccatcgaagattgctgaaaaagttatgaagagtttcacatctagttttggtagtatgattggtgcgattacgagcgttacagttagtgtcttcacgattccaattatgttgttctatatgttaaaagacggacaccgtttagtgcctaatattcaaaagatgttacctgatcgttataacgaccaagtggcggacttgcttcggaaaatgggggcgacgatttcagcttatatcggtggtcaagctctagagtgtttattcgttggcgtctttacatttatcggttatctcattatcgggatgccatacgcttatttgttaggatttattgctggcgtttctaacgtaattccatacttagggccttatattgggattgcgcccgcgttgattatcagtttatcaatttcgattcccaaaacaatcatggtgattgttgtcgtcattgttgttcaacaaatcgatgggaacttgatttatcctaacgtgattggccgttcattagatattcatccgctaaccatcatcattatcttgttggtcgctgggaatatttatgggattttaggcatgattttagcgattccgttttatgctgttaccaagacagtgattacttatttatatgatattcaagcgttacggactaaagctaaaaaaaggaccgacctttaaaagatgcaggttgaatttccatttttgactatgctatactgcaaggtaggccatattcggctaaatgtacttatttagataatgaaaggtagtggatgtgacgatgaatcctgaccctggaagttcggtgtggggacagttactgttgatattaattttgaccttagtgaatgctttttttgctgcggcagaaattgcacttgtgtcactaagtcgtgtgaagatggaggagcaagccaataaaggtgacaagaaggcgcgagtattagttcaagtcttaggtcattccaatcagtttttagcaacaattcaagttgcgattacgtttgcgggcttcttatcttcagcgagtgctgccacaaccattgcgggtagattagcaccccttttaggaaatgcggcttggacaaaggaagcggccgtattaattgtgacgattgtcttatcctatgtatccctggtttttggggaattatatcctaagcaagttgcactgcatcgtgcagaagcaattgctaaaataacggtgcaacccgtgcggatcgtcggtatcttactgcgaccattcgtgtggttgctatcaatgtcgacctcgctcttaatgaagttgacaccaattgatttttcagaaacagaaccgaagctcacccgagaagaaatggtccacatgattgaatctgggaagagtgccggtgttctggaaaccgatgaatacgaaatgttagaggggattattaccctcaataagaagatggcgcgcgaagtcatggtaccgcggactgatgcatttatgattgatatttgtgcagacaacgatcaaaacatcgatgccatcttagcccaaccattctcccgcattccggtttatcgggatgataaggatcaagtggtgggggtcgtgcatatcaagaatctcttgaaagaagcacgccaaaaaggttttcaggccatgcaaatcgaagcggtaatgaaagaacctctttttgttcccgaaacgattacaattgatgatttattatttgaaatgaaacgtacacagcaacaaatggcaattctgttggatgaatacggtggcgttgttggcttagccacgattgaagatttattggaagaaattgttggtgaaatcgatgatgaatctgataaagctgaagaattgtaccaaaaaattgatgcgcagcattacaccgttatgggaagtatgccaatcaatgaatttaacagtgccttcaatacagatattcaagtcactgatgtggatacaattgccgggttcgtgattactgaaattggtgccattccagtcagtggtcatccggaaacaattgagctgccaggtggcatgagcttaacgacggggtcggtttccggttcacggttgattgatttacaattaacgttaccagaaccagagaccgatgcaccagaagaagtcgactaaattaaatgagcacaatcaatgggacaaagggtgacgcaatggttgcgcaattctttgtcccaagcgcattatattggaataacggaaaggattttataatgacacctactgaattaaaaacggcggttgatcgtcgtcgtacttttgcaattatttctcatccggatgctggtaaaacaacgattacggaacaactcttacttttcgggggcgtgattcgtcaagccggaacagttaaagggaaaaagagtggccaatttgccaagtccgattggatggaaattgaaaagcaacgtgggatttccgttaccagttctgtgatgcaatttgattatgacgacaagcggattaatattttggatacaccgggacatgaagatttctcagaagatacgtatcggactttgatggctgttgatgcggcggtcatggtcattgattctgctaaagggattgaaccacagaccaagaaattattcaaagtctgcaaaatgcgggggattccgattttcaccttcatgaataagttggatcgcgatggtcgtgaaccacttgatttgattgctgaattggaagaactattggacatcgaaggctgtgctatgaactggccaatcgggatgggaaaagacctccgtggcctttatgatatcgccaaccgtcgaatcgaactttatcgaccagaagacgaagccaacccttatttggcccttgatgaagcaggtcggattgccggtgataatccattgaaagaagattctgtttacacacaagcccttgatgatatcgaattgatcggtgaagcaggcaatgcctatgatgctgataagattgcaacgggtgaacaaacaccaatcttctttggctctgctttgactaactttggggttaagacgttcttagaatcattcgttaacttagcgcctgccccagaagcacacaaaacacaagaagaaacgttggttgaaccaacctctcctgatttctcagggttcatcttcaagattcaagccaatatgaatccagctcatcgtgaccggattgcgttcgtacgaatttgttcgggtgaattccaacgcggaattgatgtcacattgacgcgaacaggcaagaagatgcggttgaacaattcaactgaattcatggccgacacacgggaacaagtgacaagcgctgttgctggcgatattgttggattatatgataccgggaatttccaaattggggatacgattcacacgggtaaagaggctgtttcatttgagaaactccctcaatttacccctgaattattcatgcgcgtcactgccaagaacgtgatgaaacaaaagtccttccataaagggattcaacagttggttcaagaaggggcgattcagttgtataagacttacacaactggcgattatatcttaggcgccgttggtcaattacaatttgaagtgttccaatatcggatgcaacacgaatataattctgaagtattgatggatccaatcggttcaagaactgcgcggtggatcaatccagaacaattggatgaacggatgtcatcctcacgaaatctattggtaaaagatattcatgacgaaccattgttcttatttgaaaatcaatttgcagaacgttggttccaagataagtatccagacgttgaattaaccgcaaaactataatataaagagtcaaacaaaaataagccgccgattcagacacactaactgttgtctgaatcggcggcttattttttttagggggggtatttagtcaaaagttaggaggccttccattaaccattgacctgttttaagttgacaccagcgactttgattatcgagtacaacgacttgcttaacgactacccgtgttttaggcactatctgatatgttgtgggttggtcatacggtgcttgccaaaatgttacggtattgttgttcagacttgcactgaggtttagaggggttgtttcgataactgcgtaatggtaggtgaactttggtacttggtatgattcatcactgcctttaggattagtggcatgtaattgataacgcgtaggggtaatccaagaactgccaagattgaaccattgtttgccagatggagcagttgcacagctataaatcttccaaaccgcgtgctttggcaagcgagcagcagtcagcgcttcttcacttggttgctgataggtatccgttggctcaagaagttcgatgaagggctgttcaggtgcatcgctgtgttttaaattcagcggatcatatttaaaatggacaaactgtgtcttagttgtaaagcgaccagtctgattagctgaggtgtggtgcacgaagttagcaccaccttctagtggattggcttgatagtgttcgttcaaagcacctgataaaaattggggcttaatcaacaagccaccttctaaattctggtgtaacaccattactggtgctgcgagttgcggtttataaaaaagccagatagtggtgttttcttcaggaaactgttgttttaaattggtaatagctgccaagtaataaccggcaaattttagccatggcaaattgagcacggtacccacttcacctgtcagggtcatcgttggtcgtaaagggacccgatgatgatcgaggtagtgaatggtaactgtgctatggcgcggttgtgtggacatcgtagccagcagtggcgttgcgtcctgactaacgggaacgaccggctgtttctgtgacgattgaggcgcttgacggatgggctcttgctcagagacagtttggcgtacatgactgttcggtagaggagctgcttttttcgggcgccatttcaataacgattgaagcaggttaatcagattcatacggactccttgtagcgcattacttattactactagtctatcataaattacaaaaagtgtggttgataattaatgcgtcaagtgggcataaaaaagaacccctgcaaaaatagcagtgattctaatcgtttaaatatctaatacttgtaatttagttgcagtatgggtgacgcggccgatggaaacgggaattaaggaaacgattaattctcctgtacgtgaaatgacggcgcgttctagatgtccaccaaaaacgcttgtatctaaacgagcaaagcttgcatgtagatggacatcaatcgtgccatttgcattttcgacattcccactaagggccagcagttctacttgctcttgactggaagtggcaatatattgatccgtttctggtgaataaacgctgacggtaacttcatcacaggcaccaatccccgtgatagttcccagttggttggggaaggttgcggccaaatatttaagttctgttaggatttcgtcgcccacttctaaccggcaaataatttggtgctctttttgaaaagtcttcatcgcgtcattaatcctcctaaattaggttgaaagttattatacgatacgacctattcaattgccattattttgcctatgtaaaaaaccgccccaacaaaatgaaatgtcggggcggttcgaatgattaactcactgtttttgaaggtgttggaattgtaatttcgactaatggaccatcattcaagacttcaaggccatctgtggaatctaaaccggcgagttccttcaatacaaaatcgatctcggcttgttggacatgtcgatgatcattttttaaaaggagctcacgttccttcgatgaacgcgagtcaagaaccgttgttttaccaagtgaataaaccttaacgtaggttgcggctgttgcagcgagttgttgtgaaacaagtcgcttataagaattggttacattgattaagcgcatctaaatcactccctggatgtttaagtcttaccactagtataactgaaaacgcttcatttggcacgtaattcgttttaacttgagataataaagccttttaatctgtgacctgtgaatctttagcatcggtgatttgaatctgatcttccaccaaccgagccgtcaattgtttatgttctgggtgatcgagataatagtcagccacgcgatcttcaatttgttcttgaataacacgtcgtaatggacgcgcacccatctctggattgtaaccaagatcgacaagccgtgatttgactggttcagttacggcaatgtttaacccttggtcagcaatcatcgcatttgtttgatcgagcatcagactgacaatcttcaagagattttctttgcttaatggttggaactcgatgatatcatcaaaccggtttaaaaattcaggtttaaagtagttttgtagttggtttaaaatcgagtgtgtctgaccagaaagggttgccccgaaaccaacattggcttcggcatcagtttggccggcatttgaagtcatgatgatgatggtgtctttgaagctgaccgtccgtccttgtgaatccgtcagacgaccatcgtctaagatttgtaggaacatatgcatgacgtctggatgtgctttttcaacttcatccagtaagatcaagctgtatgggttgcgccgaacttgttcggttaattgacccgcttcttcatagccaacatagccaggaggtgatccaatcaattttgacacactgaatttctccatatattcgctcatatcaaaacgaatcatagcatctgtgctaccgaaaagttctttggcgatttgttttgctaattcagttttcccgaccccggttggtccaacgaataggaaagaaccgattggtcgaccggatttgttgaaaccaattcggttgcgacgaatggaacgggcaaccttatcgactgctgaatcttgaccaattacgtgcgcttcaagattttcagcaaggttcttcaactgtgcttgttcttgtgcctttaactcaccaactggaatgtgggttttttcttcaacgattttttccatatctttgtcggtgacggttggcatttcagattggtcaatggcacttgtttcgcgcatcttggtcaattttgtgacttgatcgcggtaataagcggccttttcgtaatcctcgtcctttaacgcactttgcttttcagcttccgcattttgtaatttcttttcgatttcttttggatcgacaacggtaatcgtcaagttcttcttagagccggtttcatcaagtaagtcgatggccttatctggtaagaaacgatcctggatataacgattagaaagggttgcagccgccttaagtgcctcgtctgtgtagtggacttggtgataggcttcgtatttatcttggagtccttttagaatttggactgtttcgtcaacagaaggttcattgactgaaacgggttggagacgacgggcgagggccgcgtctttttcaatttgtcggaattcattattcgttgtggcccctactagttggagttcaccacgggcgagggcgggttttaacacgttaccggcgtccatgccaccttcggcattaccggcgcccacaatttcatgaatttcatcaatgaagagaatgtattgcttattctgcttcaattcagtcatcagttgttgcatccgttgttcgaattgaccacgaataccggtcccttgaacaagtgaaacaacatctaagcgaatgacttgtttatccttaagtttggtaggaacgtcatcgtcggcaattttttgagctaagccttcgacaacggcggttttaccgaccccagcttcaccgattaatacgggattgttttttgttcgacggtttagaatttcaataacacgatcgatttcagcatcgcgaccgatcactggatcaatttggccagctttagctaagttggttaggtttacaccgtattgactgagcagactttcgccgttttgcccgttgttgccgccaccttggccgccactttgggtttgtggcccttggtttgcttgtgattgatcatcgggagttgcgcccattgctcggaagaaactatccaggcttccaaagccaaatggatctgcatattgcccttgtggtgcttggccattactgttttgttgtttcaagagttggtaacagttttgacaaagatcgatttcttgtcgttgaccattggtgcttgtatagagatgaatcgttgcaggattcttctggcagttttgacaaagcattaatctgtcacaacctttcattaataatagaatcgtcaaagtgttcttgactatctttgacctttatccaaattataatcatctctaaaaaaagttgcaagtcaggcaactcgaaaataaaagtttcttgtcaggtatgggcggtatgcggtagtatgaggtcatcgttttatttcgcagatggaatgaaaacgaatttttcaagccacgataaaagaattgcaaaggaggcagaatggcagatgcgtgattttttagcagagatggatgccttaataaataacgaacaaactgagattgaggttgctcagtccgaatttttagattttcagaaagtatgggtcaactatgaccatcgaaaagaaattgtgggcgaagcacaacgaaatggtgcggtaatctaccgcaagtctgaaagcggtatagtgtagacggctactaattttgttagcgaaactgttgtagtattttaaaaaaaatggtaatcttaaatatcggaagggtagccactactagtgaccactcatttcgttaaaaactaaatctataattagataaaaggggatcgattaatatggaaaaacgcgattttcacgtagtagcagacacaggtatccacgcacgtccagctacattattagtacaaacagcaagcaaatttaactcagatgttaacttagaatacaaaggtaaatctgtaaacttgaagtcaatcatgggtgttatgtcactcggtgttggccaaggtgctgacgttactatctcagctgaaggtgctgacgaagcagacgcaatcaacgcaattgaagaaacaatgaaaaaggaaggtttatctgaataatgacaaaactaagagggattgctgccagtgatggtatcgctacggcgaaagcctatatgttagtgcaacccgatttgtcattttcgaaatcaactatttcagattcagaaaaagagattaatcgtttgcataatgccttacaagcttccacgagtgatctagagaccattcggaagattgctgctgaatcattaggggaagaagaagcacaagtttttgatgcccacatgatgattttagcagacccagaatttaccggcgctatcgaaggtaaaatcaatgatgacaaggttaatgctgagcaagcgctcaaagagatcgcggatttattcgtggccacttttgaggctatgactgataacgcatacatgcaagaacgcgctgctgacatcaaggatgttactaagcgagttctcagtcatttattaggggtaacactccctaacccagcgttaattgatgaagaagtaattgtgattgctcatgacttgacaccaagtgacacagcccaattaaacggtaaattcgttaaggcttttgtgactgatattggtggtcggacttctcactctgctattatggctcgttctttagaaattcctgcaattgttgggactgaaaatatcacaacttctgttaaagccggcgaacaattaattgtcgacgggattaacggggatgttattatcaatcctacagatgcagacattgctgaatacgataagaaggcgcaagctttcgctgatcaaaaagcagaatgggaaaagttaaagaatgaaaaatccgttacaaaagacggaaaaacattcacagttgctgcaaatatcgggacacctaaagatttagatggtgttatcgataacggtgctgaagcaatcggcttataccggacagaattcttatacatggactcatctgaattacctagtgaagatgatcagttcgaagcttataagactgttttggaaggtatggctggtaaaccagttgttgtgcggacaatggacattggtggggataagaaattaccttacttgccattacccgaagaaatgaatccattcttaggctaccgtgctgtgcggattagtttagatcgtgatgatattttcagaacacaattgcgtgctttactccgtgcttcaaactacggtaagttacgtatcatgttcccaatgatcgcaactgtcgcagaattccgtcaagcaaaaggcattcttgaagaagaaaaagctaaattaattgctgatggtcaaactgtttctgatgatttacaagttgggatgatggttgaaattccagccagcgccgtcttggcaaatcaattcgctaaggaagttgacttctttagtatcggaacaaacgacttgattcaatacacaatggctgctgatcggatgaatgaacgtgtatcatacctttatcaaccatacaatccagcaatcttacgtttaattaagaacgttattgacgcttctcataaagaaggtaagtggactggaatgtgtggggaagccgctggcgattcagtcatggcaccactccttgttggaatgggcttagatgaattttcaatgagcgcaacttcggtccttcgggttcggagcttgatgaaacgtttagatacaactcaattaactgatttagttgaaaccgctgttaatgtgaatataagtaatgaagaaaaccaaaaattagttgaagattttatgcaaaatctttaattaaatggtaaaagaccgcccactgtggcggtctttttttgtgcgtaaaatttggatgagcaaaaaagattgacagttatcgattacaaatgtaaactgtaactaatgattacaaatgtaaacgaaagggagaaaaccgcgaatgactgaaaaaataggggttgttacggatgcggaatgggaaattatgcggatggtttggtcacttgggcaagtcaacagcagtcatttaattgaactcgttcagcaaaagcgtgattggcaagcgtcgactgttaagactttgctaggtcggttggtaaaaaaagactatctaattgccactaaagaaggacgccgatttatatatacggccaatatcgcagaagatgaagcgatgaaccatgccacgcagtcgctgtttaaccaattatgtgggatgaaaaaaggctgcacattagccactttaatcgagcaaacaacgctcagtcaaaatgatattcagacgttacaaacggtgttagcggctaaattacctagtgcaccaacaatgattgaatgtgattgtttaccagccaattgtgattgcatagaggaggaagtaaaatgaaacacgatgaaatgcaccatgaacatgaaggacacgatatgaaagagatgcatcacgagcaccaaatggatcacagcatgcacgacatgcatcatgaccatgagatgatggatcatgatatggggcatatgaatcacgatatgcatgggatgcaccatgacatgggcgacggcgatatgatgatgcatggtggtcatatgatgcacatgggaaatctaaaacaaaaattctggatttcattaattgcaacggtaccaattctaattctctcaccatttatgggcatgcagttaccttttcaaacgactttcccaggttcagattggctagtattgattttagcaacatttctcttcttttacggtggggcaccgtttttaaagggcgctcaaggagaattatctgctaagagcccagcgatgatgaccttaattgcaatggggatcagtgtttcttatctatatagtttatacgcctttgttgcgaaccatttcttgaacccacaaggccatgtgatggactttttctgggagcttgcaacgttaatcgtcattatgttgttgggacactggattgaaatgaatgcggtaatgagtgcagggagtgctctagaaaaaatggctgctttgttacccggccaagcacaagtaattgatcaagcagggcatcaacacgcggttgatttaaaggacttgaaaaaaggacaaactgtattagtcgcagctggtgaaaaagtacccgcggatgggttaattatcgccggtcaaagccaagtcaatgaatccttagtgacaggtgaatcaaaggctgttgcgaaggctgaaggcgatcaagtaatcggagggacagtcaatggaaatgggacgttaaccgtgcaagtgaccgggactggcgaaagtggttacttagcgcaagtcatgaaattaattaaacaagcacaacaagaaaaatcaaaagttgaagggttagcagataaagttgcgaagtatcttttctatgctgcattggttgctgggattatcgccttcattagttgggtgttcttggccgatctgaatacggcttttgaacggatggtaaccgtctttattattgcttgtccgcatgcacttggattggccattccattggtggttgccagaagtacagcgattgcggctacaaacggcttgctcattcgtaaccgtgaagcaatcgaattgtcagataaggttaccgttgttttgatggataagacggggactttgacacaaggcgcattcaaagtgaatgctgtcgaagttttcgatacagcacttgatgaacaacgactcatgcaactctttggtgcgttagaacgccattcaagtcatccattggccactgggattctagagtataaccaagcacaaactattcctgatttacaggcagacaatgttcaaacgattcaaggcgtcggtttgtctggaacggttgcagggcaaagttatcaaatagtgacggcaacttatttacaagcccagcatattaaatttgatcaagctcttttccaaactttagcagaaaaagggaattccatcagttatctattacaagatcaaacggttttaggactagtcgcacaaggtgatcagattaaaccagaagcgccagctttcatccaagcattaaagaaacggcatatccaaccggtcatgttaaccggtgataatcaacaagttgccgaaaaagtggctgcacaattgggcggtatgacggttcaagcgaacttgaaaccagaagataaagaagcaatcgtcaaagattaccaagctaaaggcgaagtcgtcctgatggttggggatggtgttaatgatgcaccaggtttaacgcgggctgatatcggaatcgcaattggtgctgggacggatgttgcaatcgattcagcagatgtgatcctcgtgaagagtaatccaaacgatattatgcatttcttgaatttatcgcacgcaactaaccgcaaaatgacgcaaaatctctggtggggcgctggttataatattttagcgattccattagctggggggctatttgccggaattgggttagtattaagtccagcagttggtgcaatcttaatgtcactctcaacaattgttgtggctattaatgcaatgactttgaaattaaaacgagatgcatgatgtcaatctttttttaagcagtatgaagtagatttcgataaggacgggcgaaagaaaatatcgcacacaattagacgcacacaacatatagttgcagtgcgtctttttgttggtttatctactatatataggttgaatctgaatttttaatccgctatgatggggttactgattcaaaaggagactggtgctaagatggatatgaaaattgcttcagaagcagacttgcaaattaaagtgattaaaagagatgggcgaatcatgcctttttctgcggataaaatcgaacaagcaattattaaagccgctaaaaatgtgaagacggaattagagccattagactatcaagtgttaaacacagtcgcactagatgttgtgagtgaagtcggcagccgatttgataaagatgttaaaatctatgaactgcaaaatattgtggaacataaacttttagaacatcaccaatatgatattgcccaagaatacattaactaccggacgcaacgggactttgcccggaataaggcaactgatatcaactttaccattcaaaaattattgaaaaaagaccaaactgtggtcaatgaaaatgcgaataaagatagtcatgtttttaatacacagcgggacctaacggcagggacagttgctaaagcgatggggcttaagatgttgcctgataaagtggcgaacgcccatttaaaaggcgagattcattggcacgatttggattaccaaccatatagtccaatgaccaattgttgtttaatcgattttaaagaaatgttgaatcatggctttaagattgggaatgccgaagttgaagcgccacattcgattcaaactgctacggcacaaatgtcacaaattattgctaacgttgcttctagtcaatatggtggttgttccgctgatcgggtggatgaattattggcaccatttgccgaaaagaattatgccaaacatttagcagatgccaagaattggattgatggcgaagcaaaacaaaaggattatgcgcaaaccaagactgaaaaagatatttatgacgccatgcaagcgttggaatatgaaatcaatactttatattcatcccaaggccaaacaccatttacaacgcttggttttggattaggcagtaactggattgaacgtgcgattcaaaaagcaattctttcaattcgaattgaaggattaggtaaagaaaaacggactgccatcttccctaaattagtttttgcagtaaaacgcggcttaaacttaaatccaactgatccaaattatgacatcaaacaattagctgttgaatgtgccacaaaacggatgtatcccgatgttttaatgtatgacaagttggtggaattaacgggttctttcaaagcaccaatgggttgtcgaagcttcttacaaggctggaaaaacgaacatggtgaagaagtgaatagtggccggatgaatctcggcgtggtgacaatcaatttaccacggattgcacttgaagctgatggcaaccaagctaagttctgggaaattctagaacaacggttgcaagtctgcaaggaagccctggtctttaaagtggaacgcgctaaagaagcgaagccagaaaatgcgccgattctttatgaatatggtgcctttggcaagcgtttgaagaaaaccgatagtgttgatgaagtctttaaaaattcacgcgcaactgtttcattgggctatattggcctttatgaagtcggtacagccttctttgggccagactgggaaaaggatgccaaggcaaaagcctttacggtagacgtcgttaaagacctctataatcactgcgttgattgggaaaaggaatacggctatcacttctctgtttacagcacaccagcagaaagtttaacaaatacgttctgtcaaaaagatacgcaaaaatttggcattgtcgaaaatattacagacaaagaatactacacaaatagtttccactacgatgtgcgtaaagcaccaaccccatttgaaaaattagattttgaaaaagattatccaaaatactgttctggtgggttcattcattactgtgaatacccaaatctgcgtcaaaatccaaaggctttagaagctgtctgggattatgcttacgatcgtgtcggctacttaggcacgaatacgccaattgatcaatgctttaaatgtgggtttaaaggggactttaagccgacagaacgcgggttccaatgcccacaatgtgggaacacggatgctgctacatgtgacgtcgttaagcggacttgtggttatctaggcaatccacaacaacgtccaatggtgcatggtcggcataaggaaatcgccagtcgagttaagcacatgcatattaccattggcaacgataataacaacgttgcacggcagtaattgtgaatacgggatttgaaggagtttttgaagatggcagtaaaacaacaaggcccgaagaatccggcgcccaaagaatggctttctgaaacactaagccaggattatattgcagattataaaccgtttaactttgttgatggcgaaggggtgcgctgtagcctatatgtgagtggttgcatgtttgcttgccccggttgttacaatcgagtggcgcagaattttcgctatggccgcccttatacaactgaattagaagaccaaattattgctgatttagggcaatcttatgtccaaggactgacgttattaggtggcgaaccgttcttgaataccaagacttgtttatcgctagtagaccgaattcgcgccacttatgggcagacaaaggacgtctggtcatggacaggatatacgtgggaagaactgatgcaagaatcagatgataaactcgagttgctgtctaagattgatatcttagttgatgggcgcttcatgaaggaccaaatggatctgacattgcagttcagagggagtgccaatcaacggattatcgatgtcaaaaaatcattagccgctaaaaagcccgttatatgggcaaagcttgttcattgaaagtaatatgtaaaataaagttattaaaaatttaattttcattttccgtcattggtatatacctaacacggataaaaaagagcgtcaatccatgattagaatgggttggcgctttttttagtttttgtgaaaaactggacattcataggtaatgaacggggttatcgtttgacaacgctttctgtaacataatacttgtaatagcaattattttttaattatgattcaggaaaaggagtgaggttaatggattcatttatcagtttcatggagaaacgctttttaccagttgtggcaaaagttgggaatcaacgacatttgccattcgtgacgccttcgtaacaacgatgccattgatgatcttgggggcttttgcaaccttgattaataatttaccaattccggcatataccaatttcatggatagtgtgttctcaaagacagttggtaagggcgctgaaaaggcttatatctggactaaattcgggggcaatgcttggagcgggatatttgcgattctttctgtgtttatcgtcttcctagttgcttacaatttaggtaagtcatataatatcaatccactagcagccggcgtaacagcattagggtcattctttgctgctggcggtcttgcagggatggactcaatgggcttgttcgttgctttaatcgttgcgatgatttcaacagaaattctcagacgtttattgggtaataaacacttagtcattaagatgcctgatggggtaccacctgcagtttcacaatcattcgcggcattattgccatcaatgattaccatcgcagtcttctcattatttgcaacaattctattaggctttggtgttgaaaatattgtgacatcattctacaaagccgtccaagaaccatttcaaggacttgcaaacagctatccttcagcattattattagcattcatcacaccattcttatggttcttcgggttacacggtgctaacatgatcgaaccattcatgcaaacaatcaatgcacctgcaattacagctaacttaaatgcgattaaagctggtaaagcagcaccatatattgttaacaaaccattctttgattcatttgttaacttaggtgggactggtgccactttaggcttaatcattgcaatctggttagtgggtcgaaagaataaacaatattcaatcgttgggaatttgagtgccgctcctggggtcttcaatattaacgaaccattaacatttggtttgccaatcgtattgaacccaattttattcattccatatattgccacaccaatggtgatcgttacaattgcatactttgcaactagcaccgggttagtgcccgctgcaacggttatgccaccttgggtaacaccaccaattatcggtggggtcatcgcaacggttagttggcaaggtggggtattagcagcagtgaacttacttgtttcagtgctcatttacctaccattcatcaagattgccacagacatggctttaaaagaagaagcagcccgcgatcaagcggcttaagcacaaaaaaggtccgacattcatgtcggacctttttttgtgcctataattaatgagttgactcacttgcaatggtgacgtgcccgttttgaacgttaccaatgacgatattgttcgaaatctggccagcggttgcatcggttagatagttgatactatcactcatcccgacaacagcgggacctgctttgaccgtaatggttgaagctgattcaccaggcttttgttgatcaagttgctcaaaaatggtttgatcagtctgtgataaatcggcagcagctactagtgagtccgtcttttgatagcttgttgcttgaccagcaccgatgcgtagcagttcatgatcattcatgaagaggtagagataaccgatactatcaccactagcaatcgacttaggggttaattgataaccagcttgtgctgcatcccttttttgagcagcatagattgtattttgattgagcgttactaaagtgtatttggcaagatcttgaatggcagagcgttcaatactatcataacgtttttggtacatgaagccatctttgaccatcagttttccggtgtcattagcactcgtcgttgttgcggccgcaatccaagtgccattgagttggtcgagggcaacaggactggctgttgttttggcggttgctttttgactgacgaataactgtccgcggtcaaaattggtggggttttgtagatctctgtaatgagctgtaattgcgtataggcgatttcctttggcaacgaatccttggtcaattgtatttttcccagtcttagtctcaagaaagacgagatctgagaggtgtttaatcttaaagtcagcccccaatttgtgtaatgcagcgttgacttgtgccacagtcatcagatggagtgtcttttgatagctcttcatcagatgactgcggctatcttgttgccattttttaaacgaaatttgttgataattaatcggctgacttgtgaaggtgcctttagaggtcagccaacttttaggagtggtcatttgagcaatatttgaaacggtgatgtcatcagaaagaccgtttttagtttgcttagaaaggagttgtttgttaaacaaccaagtctgtgaatcggccgcgagggcttttttagttgttgttcggttggcgtaggtcgtcgtagttggctgcgcgcgggatgtggttgatgaagccggttttttagcttggcaacctgctaggagtgttattgttaaaagtgtagtgattaaaagtgttttacgcattttgaagctccgcttcatttgtctgcaggatgggttttgccgaataagccgtcatcgtcatccgtgttgtagtaacttaaaaaaggaaagagtaatttaaaagtggaaccactgccttgttgggagctaacggtgagttcgtgaccgagcttttcacttaaggcacgtgcaaagtagagccctaaaccggttgaacgttggttagaatagcgcccattttgaccggtgaaccctttatcaaaaatccggggtaggtcttcagccggaatcccaatccctgtatcgatgacacttaaccaaacgccttgttcgtcacgttcaatctgtaccgtaatttgtgcgccgtcgggggtatactttaacgcattggaaatgatttgattcaaaataaaagccagccatttagcgtcggttaagacggtttgatcggcaccaagcagtttaaattggatgtgtttttgaataaaataattgcgattttggcggatgatttggttgactaaaggttttaaatcgtattcctgcaccaagtaatccttagaaaaactatcgagacgcgagtagtagagcacttgttcaacgtagtgttcaatttgaatcagttcatcggttaattgattgaatttgtcttctggaatctggtcttcgatggattcaatgagcaattgagtagctgccagggggaccttgctttcgtgcacccagccatcaatgaaattcttttgatcttgttgcgctgagattagtcggtcgatgctttgttgatgataggctagcagttgattcacgtagtgttgaatgaattgtttttcagccgaggtagcgcctgtaagtggccagttgaggctatcttctttagcatctaagcgtgtttggattgtgcggtaccacttgagatggtagacgtataagccaaccaaaaaggcgcagaaaaaaagcgccagcaataaatcgaggtataaaagtgtcgccttagcaaagcgcatactagggtcgagccataggacgatatccagaacaatcataccgctgaagaaaaaagcgatatgaaataaatgatcacgtaagaattttttaaacgtcataataactccttaggggatgatatagccttggccaattttcgtctgaatgtagtcttctaaaccagtactttcaatttttttgcgaagccgattgatgttaacggttagtgtgttgtcgtcgacaaaccgttcatcgtcccagagggcacgcaataacttttcgcgactgacaatctggccgtgttgacgcatcagaaattggaggagcttatattcgtttttggaaagatcaatggtagtctcacccacctgagctccgccgctttggaggttaatcattaggccgttatgttcgatgatatcggcattttggtcgacgtagttgtaagtccgtcgtaagagggcgttaattttggcaattaaaacttccatcgaaaaaggtttattgacgaagtcatcgccgcccatgttcatcgacatcaccatgtccatgttggtactgcgactagaaatgaaaattatggggactttagatacttcacgaattttgcgacaccagtagaacccgtcataaacgggcaggttgatatcgagtaaaatcagatggggtttattggttaaaaattggtcgaaaatggtatcgaaatcggtcgtaatatttgcgtgtaattgccacttatttaagttctcagcgattaagttggcaatcgttggatcgtcttcaacaatcataatttcaaacataatgaattctcctcatacatagatagactaatattaaccactttcactagaaaagacaaccaactaaggtcgtagttataaaatgggcttttgcggtcaactctgctaaaatgaataccaattagttaagggatgtgaaaaaatggcagtcgtatcagtccaacaagtttcgaaagtctacgggcatcggtttagtctggtcaatgcgcttaataatatttcatttgatattgaaccgtgggagtttgtcggtattatgggcccttcaggcgctgggaaaacgaccttattaaatatgattgcgaccattgatcggccgacgcatggtcaagtgttaattaaagatcaagttgtgagtcggatgcgggaagctaagcttgctaattttaggcggcaagatttgggctttatttttcaagattttaacttactagattcactgacggttcgcgaaaacatgttactgccattagcgcttgataagttaagtgtgccagtgattgaaaaacggttggataaagttagccgagtcttgggcattagtagtttgttggatcgttatccggatgaagtttcaattggacagcgccaacgagtggcatgtgggcgcgcaatgattaccaatcccactttgttattggccgacgaaccaactggaagtttagattcaaaatcagctacggagcttttacaatatttaaccgtgattaatcgtcaggaaaagacgacaattttattggtcacgcatgatgcctttacagctagttactgtcggcgaattcttttcattaaagatggtcaattattctcggaaatcgttcgcaatggtgatcggcaacaattcttcaatcaaattattgatatgcaagcaaccataggtggaggaggccgtttcaatgctgttacacctaaccgttagaaatgcgattaatcatgcgcgcgactatgcggcttatgtgattgcctgtgttgccgcgattgtggtttatttctgctttacgtcgattcaaactgtgccaatctttaggcacctcaagatggctggtgaatctttagcttttggccggatgatccaagtagcaggtttaattattttgctgtttgccgcttttttcttggcatatgctaatttatttttcattaaaaggcgtcggcgggagattggtgttttaagtgtcatcggggtgactaaatttcagattagcttactcttcttctttgaaagtttgattatcggtgtgattgccctgattatcgggttgttattcgggattcttttttcgaaattattcgcgatgttattattacgcatgatggggattgcggttgccatgccgtttttaatatcatggcgggccattgaacaaacgacattcacctttggcgggttgttcctattaactggttttttaaacagtacgatgatttatcggtatcaattagtgacattgctgcaaccatctgcagtcagtcggaaagtgcgccgaccgaactggctgacttatttatgggggattattgcacctgtattgattatcagcggctattatttggcagaccaaacactggttttgatgccgagcttagagcggcgctatggttttgggattgatttggtttatttactaaccattttattacttgaaatttttggcacactggctttttttcaggcctatacgcaaatttggctacagttagaacggcactggaaacggctttattatcgtgggacacatttgttaaacgttacgaatttgagttttcgttttaaaaagaatgcaaagatgttgtggatgattacgattttaagtgcagttactattaccgcaatcggaagtgcggcgatgatttatacgcacggtcaagatacattacggcagaacattccggtggatttggtttatacacaaagtcaaaaagcagcggtcgacaaaattttaacgcaatatcatgttcagccggttagtcaaacaatgtcttcgtttaaattggtggatgctcgatttaaggtcaattcaccgttaaatcgggaaggcatcaaaatggatggagcagctgttgtcatgccattatcccaatacaaccaagtaatggcgcaacaatttaagttaccagcaactaaattgaagaaaaatactgtggtgaccatcattaacttgccattaacaatgctgaagatgcctcgcagagcaggtgtaggtttgccaccgaaaagagctggaatcccgttgcaattaaaacagtctgggctttcagattttcggattgtacacattcgtaagctatttccaaacggttctgatgtcttctttgatggtaacttaaacgtgattgtggccaatgatgctgaatatcaacaagtccaagcaacttcagttgatcaaatctatgcagttcagctctccgctgcccaacaaaagcaaaaacgattaatgcgcgatttattccgtctatctcaaaagcccaaacaatgggattatttaatgacgcacaaaaaagctgggcaaacccattatgaaattaaaaccactgatcaacggctagaagagttaagccgctattctgtgcttttaaaaaaacctaaccgagatattgctaacgcaaacttcggattttatatgtatgtcgccatttttattgggttaatcttcatgttagccactggtagtatcatcatgttgaaacaattgtcagaagcacaagaagagattttgcagtataaaacattgaaaaaaattgggatgagtgacggtgagattaagcgcacgatttatttccaaattttgatgctctttttactgccaattattttgggatcgatgcacgccttctttgcaattcggttattgggtttgtttttagataatcctgggttacaattagcctatatcgtttgcggcctgtttatcatcatttactttgttttctatctaattacggccaatatctacaatcgaattgtgaatgcaccgctcaatagtgatgtgttctactaaactcggagggaaagtttttgcaattagctatgtaccgcgcaaaagcgcgtcaattattaaaaggaaactggcagaaaatggccgctttagtcgcgctttggttgttagttgagatagtagtcgactcaatgattgaaggcgtgtttggcgccagttcatttggttatcaaatgctcaacacctttgccaattatttcttatactttatctttttaaatgctgttttcttaggtgtttataaagttagccagaataagcccagctattaccgggataccttattgttattccggcaaccgttgtatacccatcttgtggtattgaatcttgttcaacaagtgttaaactggatcttactattaattgggttggcgccgttttatcggttactcggttgggatcgtgtatttcaattcacttttaatggattagattccgttgcgccttatttgctaaacattagccagcaggggacaatttctgaaactgtcttattgtttgtgacggtgatgttggttttgtcactgttgcaacccgtgattttaacgtattatcagattttagtactgttgaagtttgatttaccacaagcaccactcaaattaatctttagcctttcatgggtgattttaaaagggaactggctgaaattactcgggcttactttatcatttattggatgggaactggtcgtctatatgactgctggactaggtctcttgtggttctatccatacttaattatgagcgttacgattttctatcaagaagttaaagctaagaaagtccaagtcattcaatagcattagggccgtcatccatttgggtggcggtctttttttatttagttagtaaatatagtgcgcgcgatacccggaatgcgctactatagaaattagaaaggtggtcatttaaaaatgcaattaacagtcttaggttattacggtggatatccatacgccggtgttgggactagtagttatttattaacaagtggggcgtatcatttattgctagattgtgggagtggcgctttattagcgcttgagaaacaatttgacccattgcaactagatgtggtccttctcacgcactatcatcacgatcacattgctgatgtgggggttttacaatattattggcaactgcatcaaggaaccaaaaaggaacccattttacctatttacgggcatctgcaagatccactccactttggcagtttgacacaaccgggtgtgacgcagggctttggttatcaagaagacacagagctgaccctggggccgttgaaagtaactttcaaacggacagtgcatcctgtcccagcattcgctgttcgaattgaagaacaaacgacggggcaggtcttggtctttactgcagatacggcgtatttcccagaattagctgctttttgtcagtctgcagatttactgatgactgatacgaattttcttgaagatcgcactggtaaaatggcgcatatgacaacaacgcaatccggtaacttggcacaagaaagtggcgcagctaaaattctattaacgcatttaccacaaggggtttcggcagaaacgctacaggcacaagcacaagcgactgttggggacgtacccgtgatagttgcccaacaggatttgacaattgatgtcggagtgtgtaatataggcggcgttgatgaaacttacaaaaaataagtgaattttcattagaaagtagaaactactataattttttttgaatgataaatataaatgtaaaaacataaaaattaatggtgagtgggaaaatttaacaataaaccgttttaattagacgttttatgtccaaatgtctatttattaattattaaaaaataattaataaatttaattttagggtagttttctagtgctgactcgcgtataataaaatttgtaagagagaaaatgattgtcttattgttaagtaaggtgtcatgttaataaaggagagagacatatggttacgttatatacatcaccaagttgtacatcttgtcgtaaagcccgggcgtggttagaggaacacaatattccataccaagaacgcaatatcttttcggagcctctcaataaaaatgaaattaaaacaatcttacgcatgaccgaagatggcacggaagaaattatctcaacgcgttctaaggttttccaagaattaaacattaaaattgatgacttatcaatcaacgaattattagatttagttcaaaagaacccagggctattacgtcgtccaattattttggatgaaaaacgacttcaggttggttataacgaagatgaaattcgtcgtttcttaccacgtgaagtacgggcattggaattacaacaagcacaattactagcaggattctagaggagagtcggggctgttaacagcctcgacttttttgatgggttaaaaaattaattgctgtgatgtagatacttgaatgttacgccagatactggtatggtaggtcaaagaaagtgaattacgacgctataagaagcgcgttagaaaggggcgttgtcccatgagaatggaaaaaatcgacgagaacacaattcgggttctattagaaaatgatgatttagaagaacgcgggattactggacttgatttgttgagcaatcataaaaagattgagcggttcttctattcaattctggaagaagtggacagtgaacacacatttgcgaacaacgatgcagtaacgttccaagtgttgcctaacgatcaagggttagaattactgattagtaagaatatgccaaactttgacggtggtaaaggtcaatcagaaatggtgcaaggcaaagacggtattactgaatacattaaagaacaactgttgaaacgagatacggtccaagatgatgcgactgaggaagaggatgaaatgaccgcttatatgaatcaagcggacaatccaatgaaacagattgtgttatcgtttaagtcatttgacgattggattgctttggcacaacagctacacatcgaaagtggtgtgtcgaacctatttctttacaaacatcagtactatgcacagattattatttttatggagaatacgaccgaagcgtttgcacgggatgatttagcggtcgctaatgaatacgggcagaagtcagaatacacagcagcttttttaagtgaattcggtgaaaaagtcatggataatagtgcgcttgagttaacacgctactacttcaaacattaaaaataacgggttttcctaaatttaggagaacccgttatttttttgcgtattttcggtgggggtgataaataatgaaagttgcacagaccactaacgggtgcttaattcgcgccgatcaagcagccaaacaacagcaagtagcgcggtatttctgtccacattgtcaacaactggttcagttgcatcgtggggtgcataaagcaccatatttcgcacatatcgcagaacgtgtatctggtggtggtgagagtccagcccatctggcgggaaaacaggcgattgctgaattagcacatgcgttgggctggcatgctacctttgaagtacctgtcggcgagacacagcgcgctgatgtatggttaacgcggaatcagcaaccattaattattgaataccaatgcagcccattgacgccagataagttaaaccaacgaacaatcggctatcagcagcgccgattacctgtattatgggtggttggtgaacggtattgttttactaaccattatttaagccagcaacagttggggtttatcaactatcggcggcagtggggcttttatgtggtaagctatttgccaaagtgggggaaatgggtgttatatcaccatattgtcgcccgtgattttgctggttatgcttggcaaaccctgcgattgacaactaaggcgtttgtgcgcttgcttgtagcacaaacaagactgccagccaatcattataagggcaagtcacagcctatgcagcaacaaattattgaccgtcgattagggctgcaagacgcacattatgttgcgttacaggcggattgttatgcacaccatgaacgcttgcaagccgttccggactggtgttactgcacacgtaatgtaccacccatttatcagctcagtcagtttgaaagtcgggtaacgtggtggttgagtgcccaaccaattgatctttttttagcggtaacgcccttactccaacaaccactactaaagcaatccttatttgcacaatgggggcaaatagctttgaaacaagcattaaaaaagaaccgggggtcggttgaccaccggttctaagattaagaaataacatgcaaagcaacccgtgagaggatgcttttttgtttttgaagtgcttggaaagtctgttcaggtgttgtttcagcacaacaggcttgtttcaagagttcataggaatcgcaattttcaatcaataagcctgattcgctttcaccttttgaatagttgaagactactgctgaaggggtcatctgaatgttcatctcacaagataattgttgatctgaatcaaatgcctgtttagtaagtggactgtgccaatcttcaagtaacatttcggtatcaagtcctacgcgtttagcaattgtaaggactaattcgttgttaagttccatatctggttcacggaatgcttgttgcagttgcattaaaaatgattggctcttcttgcccccctggaacgttgctgccttataagcgagtactgcttcataaatggtgctgaaaatgtgattacgtaagtttaaatcatgactattttgttgctgaaactgcatgtaatgctcgacgttttttaagtttaagactggaataaacttaaaatgaatatttgcatcggtttcgccgataatctttaaaagtgcctcttcggaacgtaaacaaagttgcccgattgggttgataaataaaaatacttctaacaagttggttcccccaaactttctatattgtatatactgctcgacgcgcttgtactgtctactctaacaagattttaaaattatgcaataagttagcttggcaaagtttaagcttgatggataagggcgcgcataattttattgggtggtatttgttcacttaattgatagcgggtgacaaatgatttaaaccaagttgccccttcttggacgttggtgacttcaatttcgacttcataatcctgggtttcgtcagggtattgggtaacatcaagcgttaacaggccagcaactaaagacgcggtctggcggtgcgttgttgcctgtccccagatgaacaattctttgataatcacggcttgtgctgcaaaatagacagcgatctgaccagacgataatacggtttggtgctcaattaagtgagtagcctgctcaagtgttagacgatcagtgatttcaatcagactatgagcattttctacggttggcacctttagcgtctgttcggcataggtgtcaaagagtcgaatacgcaacccccagtgacgtttagccaatccctggttaggcagttcgaagtaataattggtttgcacaaacggcgctgcaaatggatagtccgcttttagttgcgagaattgcgccgccgttagcatcgtcttaaattcgcgttcaatcgtttgtgacatcggttgagctcctttttaaaaaagcaatgttattatcctagcacaaaaaagcagacttgtaatgaaatttgtatttcagacgattattatttattcaattctaatctatgttaaaatagtgctgtatgtgacagagtgaatgaggggtttataatggtcgaaaattggaagaagtttttaatgccttatgaacaggccgttagcgaattaaaaattaaattacgtgggatgcgcaagcaataccaacaaaataatgaacatgcacccatcgaatttgtaactgggcgcgttaaaccaatcgatagtatcaaagaaaagatgcaacgccgctacattacagaagatttactcgaacaagatatgcaagatatcgctggtttgcggattatgtgtcagtttgtggaagatatccatgaaattgtgggccttttgcaccaacggactgatatgaaaattgttgaagaacgggattacgtttcaaatgttaaaccaagtggttaccggtcatatcatattgtaattgaatatccagtccaactaatcagtggtgaaaaattgattttggccgagattcagattcgaacaatgtcgatgaacttttgggcaaccattgaacattcattaaattataaatatcaaggggaatttcctgaaacgctgaaggcgcggcttaaaagagcggccgaagcatcctttatgttagataaagaaatgtctgaaattcgtgaagaaattcaagaagcacaacaactcttctcatatggaaaatggcaaaacgcacttgaaaaggcaactgaaaatgattctgaaggagagacgccagattgaaagtaacggtatttagcaatgacggtagttcttccgttcaagttgccaatcgcttaacgcaaaaattgatcaatacggggtttgtcattgatgatcaaacgcccgatgtggtcatttcagttggtggagatgggacgcttttatctgcctttcatcggtacgcccacgatttagcgcacatccggtttattggcgtgcacacaggacatttagggttttacactgactggcgcgattttgaagtcgatgatctagtcgtcgccttgcaagaagatctcgggcagagtattagctatccgttattagaagttaaaatcgaatatgcggatacgcacgaaatcagtcgcagtttggcgctcaatgaagtgacgttacgtcggtatgcagcgactttgcggacggacgtttacattaaagagaatttttttgaaagttttaggggcgatgggctctgtatttccacaccaactgggtcgacagcttatagtaagtcgattggtggcgcggttttacatccacgcttagacgcgatgcagatgaccgaaattgcgtcgattaataatcgcgtatatcgaacactatcggcaccaatcgtgttaccatcggatgaatggttgctcctgaagccttctaagacaagtgattacgttgtgacaattgatcaattcacatttaaggatcgaccaattgcctcgatgcaatttaaaattgcaaaggaaagaatacagtttgcacgttatcgacacacccatttctggaaccgtgtcgaagatgcatttattgggtcaaaacatgaaatttgaatggcaatatcaagatgcagaaggctgtgtgttgcggaattttttacggcggcataagctttctcgcagtcagttaactaaaattaaatttgcaggtggcacaatcctcgtcaacggccaggaggcacataccaatgcccaactggttcaaaacgatgtggtgactgtttacctcgcaccggaagtggccgtcgaacacgtcatcccagttaaaggggacttgaaagtggtttttgaagacgaccattttttagtggtcgataaaccggcgtttgtggcgtcgttaccggcaccgaaccatccgcacaacacaatggccaatttcgtcaaacaatacttgattgaccaaaatgctgagagccaggcagtgcacgtagtaacgcgcctcgatcgcgatacaagtggtttgatgatgttcaccaagcacggtttcgcgcatagtttgttggataagcaactccaatctaaagaattgcaaaaaacatatgttgcgattgccagtggtgatatgcggttagattatccgcaacatgcgtggattgatcggccaatcaaacggtcggatgatttttacatgcggcgggtcgttggggttggtggcaaacgctcattaacggaatattggcaagaagcccatggcaccgatgccacgttagttaagttgaagttactaacaggtcggacacatcagattcgggttcattttgcatcactggggcatcccttaattggtgataatttatacggtgtggccgatgatttattaccgcgtcaagcattgcactgtcgcgagttaacgttctatcatccatttgaagaacggtatgtcacggttcaaagcgaactaccagccgattttcaagcagtgatggatcaacgtcatttggcttttcctgcgggcgaattgaataaaatttgattaagctttcaatttgagtcgcaatctaactttagaatgagtatactaataaacgattatggattacggagggattagtattgtgttaactttaaatatgattaagacaatcattttagggattgtcgaaggttttacagaatggctaccaattagttcaaccggccatttagtgttggtcggtagtgttttgaaacttgatgaatcaaaagcattcatcgatatgtttaattatgtgattcaatttggagcgattatggcggttgtgattctatacttccataaattgaatcctttctcaccacgtaagaaccagctcgaacaaaaacaaacgtggacgttatggtttaaggtaattgtggcggtgattccatcagtcattattggattcccattgaatgactggatggatgaacatctgatgaaaaactggattgtggccagcatgttgattttatacggggttttgttcatcgtcatcgaaaatcgcaacaagcataccacaccgaaatttgctgatttaaatacgttaccttggttgacggccttttggattggctgtttccaagccttatcaattattcctgggacatcccgttcaggcgctacgattttaggggcaattattttagggacatcacggtttgtgggtgcggaattctcgttcttcatggcaattccaacgatggtcggcgtggcaatcttgaagattggtaaattcttgtaccaaggcaatacgtttacgggcgatcaatcaatcattttattagtcgggatgttggtttcattcatcgtttcaattatttcaatcaaattcttgatggattacatcaagaaacatgatttcaaggtcttcggttggtaccggattatcttgggcctacttgtcttaggtgcaatgctatttgcataaaggattaaattaaaatttggagggttcatccatgttaatcaaagaagtttgtgttgaaaatttcactaaaattccggcagcaatccgcaatggtgctaaacgaattgagttgaacgacaacttggctgtcggaggcacaacggttagccggggtgtgatggctgaatcagtgcgttatgcgcatgaacacgatgtaccagtgatggtcatgattcgtccgcgtggcggcaactttgtttataacgatcaagaattaaaaattatggaagctgatatcttttcagcgcaagaattaggcgctgacggcatcgtccttggttgcctaacacctgacaatcaaatcgacgaagaagcgatggaaatgttgattggtgctgccaatgggatgcaagttgttttccatatggctttcgatgaaattgcggctgatcaacaagctgcagcaatggaatggctgattgatcatgatgttaaacggattttaacgcatggggggccgttagacgcgcccatcgacgaagcccgtttaaaaacgttaattcaagctgctgatgggcagattgtgattttacctggcggtggcattacagccgacaatgtcgacgcgttaacagaacgtttacaaatttccgaagcacacggtacaaaagtggtcgggacattataagatagtaaaaggcccagtcatcaatgatgactgggcctttttttaatgtttgaataggagataatcgactgacgacgcactctaaacgtgctctgtaaggcatccgcctccggttaaccctgagccgcaaacgattgctttcagcaatcattcgccagtctaggctaatcctcaagagatacccgactgggatcacactctaaacgtgctttgtaagtcatccgcttccggttaaccctgagccgcaaacgattacgttgtaatcattcacgacgctgtgttaatcctcagcggatattcgccttacgacgcactctaaattttttctatcgctaggacttgtccttggtcggcgttgattgccttgtagtgggttacttggtaattggttggttctaggcgacttaagtcggcgattagatagtcgatttcttcttgagtttcattgaaccgaggatcaacaacgaataccagtaagccaccgcgattaagccgtgagagaatttgatgataggcagagattgtcgtgttaggcaatgtcacgtgttcaaaagaatcaggactgagtgcgcctaagctaaaaatggcggcttgcacttttaactcgggtggtaaggcagtgataatccgctcgtgtccttgattaagcaaagtaacctggtttgcttggtttgcttttgtaagacgatccgcgcaggtttcgatggcttctttttgaatttcgaaaccgtaaacctgaccaaaatcagcaacgcgttctgctaaaaataaggtatcatcgccatgccccacggtggcatcaattacgacatcgccgggccgaattgcctggtctaatagaaaatgtgcaaatttagtgggatgatcaagtatcatgtgttaggactccttcagatgcaataatttaaaatgaataaaacagtaccatgaaccgccgagacacgccgttgctaataaaaagccagctaagacatcactcggataatgaacaagtacgtaaatccgactaaggccgatgcatagtgccaatattaaacaggtgccaatcgctatttttcgccaaacgcgttgacgaattaagtagtaaactaggatgcttaaagttccgaaaaaaagaagcgcccccgaagcatgaccgctagggaagctgtagccgcctgcgtagacaagatggtgaaatgggggccgtggtcgttggacgctcatcttaataaagtggttaagcgttgaaaaaaggaccatgttaatgactaaaaagctagctgctgaccactgtttaaagcccagcaaaccaagcgttacaatggtggtcaaagtcattatactatagggattgccgatcgacgtaatcgcaatgcttacagtatccatcaatggggaggaaagcgaccggatgccagttctgataagggtatcaaaatgtataacccaagtggcatggtgcacaacgctgattaaaatgattagaaaactgattgtgccaagaatgaataaactagccgaaaatcgtttggtcatttttaagaaatcctttcaaaataagctgtaattaaagacaaagaagattattaaatgatacaataattattaagcataagacaactaataaaagtagttgcgtgataggattgtttttcctctttattaatattataataaagttcaggtgaagctcaagttaattgtgccacagacaataatagtggaaattcggaggcgttagaattgaaagagactagaaaacagcgaattgcagctcaaaaggtaagcttacataagcagaagcgggaaattagaattaagaaagttcgtaatgtgacgacttttgcaggggcaaccgtcttgatgggttcagcaattgcacctagtttttcgaatcgggccaaagcagccactgaagatgtgttaaatagtgcaaacaatgatgaccaagctacaacagctaatacagcaagtagtgcaacatcatcaacaactagttcaagcacaacgacaactgaatcccaatcaacacaacaacctgttgtaaaacctcaattgactgaaaatgaagcgacaaaggtggctacgccacaaccggcaccatctcaagcgcaaccaatttctggagtgcaaagtacgagtgccaatatcgcaaccgctggcgttgttatggcagcagctaattcaagcgcacaaaatttcatcaattcaattgctagttcagctcaacaattagcgggtgataacgatttgtacgcctctgttatgattgcccaagcatcattagaatcaggatttgggagcagtggtttaggttctgcccctaattataacttgtttggggtaaaagggacttacaatggtagttctgtttatatgtggacttgggaagatgatggtcatgggaacatgtatcagatccaagctgcatttagaaaatatccttcatactaccaatcgttacaagattatgtgcatgtgctacggaatacttcatttggtgcaacgccttattatcaaggggcatttaagagccatacaagtagctatcaacaagccacacaatacttacaaggacgttatgcaacagcaaccaattatgcgtcaagtttgaaccgtttgattcaacaatacaatttaacgcaatatgacacgccagggaccaatactggtaacaataatgggggaacaacgactctaaccacgccaacgacacctgaaaatgggacaaaatacaccgttaaagccggcgattctgtttgggggattgctaatcggtatgggatttcaatgaatgacttgattagctggaataacatcaagaacaatatgattcacccaggccaagtcttgattgtttcaagtagtgcagctggcaacaacaatagtgggacgacaaacccaacagaccctacaacaccaacgaatccaacaacaccagctaatggtgataagtataccgttaaagccggcgactctgtttgggcgattgccaacaaatatgggatttcaatgaacgatttaattagttggaataacatcaagaataatatgattcaccctggcgatgttctaacagtttcaaaaaccgcaactggcaatacaaataacaataattcaaacagcaataacggtaatcagacctcaaataaaacttatatggttaaatcaggggattctgtctgggcaatttcaaaccgttacggcatctcaatggctgacttggttaaatggaataatatccggaacaactttatctatcctggtcaaaaattagtggttagccgaggtgcaacaactggtaattcaaacaataataatacaaacagtacaaatccagggcaaacttctgggaagacttatacggttaaggccggcgattctgtctggggaattgctaaccgtaatggcatttcgatggcgcaattaatcaaggctaataatattaagaataactttatctacccaggtcaagtcttaaaattaacggctggcgctacaacgccaacgacgcctaacacgaattctgggaagacttatacggttaaatcaggcgatagtctttggtcaatcgcacaaaaaaataataccagtatcgcacaattaaaatcagcgaacaatttacattctgatttaatcttagtcggccaagtcttgaaattgaagtaagagtttggtatgctaagaacaattatttaacgttgagaaggattagtagttatcgttaagcgttcagagagcgtgtggttagtgggaacacgtcgtttaacataacgaactcacctttgagttttctattgaactgatagtagatagaaacgtctgccgcgttaaggccagagggttgtccaatatagattggacagaacttaggtggcatcgcggtcaattcgtcctatggtatttataccataggacttttttattggcgttaagtgaattaaaaaagagtgcgtcaaaagtgtccatgcttttgaaagcacgttaaaaaaaggagtgtttgatatgacttacgatcatcgcgcagttgaacaaaagtggcaagcttactggcaatcacacaaatcgttcaaaacaacagaagataaaaataagaaaaatttctatgcattagatatgttcccatatccgtcaggtcaaggcttacacgttggccatcctgaaggttatacggcaactgatatcttggcccggatgaaacggatgcaaggcttcaacgtgttgcacccaatgggttgggatgcattcggcttacctgctgaacaatatgcgttggatactgggaataatcctgctgatttcacgcaaaccaatattaatacgttcaaacgccaaatcaattcattaggcttctcatacgattgggatcgtgaagtgaatacaacggatcctgatttctacaaatggacccaatggatttttgaaaaaatgtacgaaaagggcttagcttatgaagctgaagtggctgttaactggagccctgatttagggaccgttgtcgcaaacgaagaagtcatcgatggcaaaacagaacgcggtggctatcctgtttaccggaaaccaatgcgtcaatggatgttgaagattacggcttatgctgatcgtttaatcgacgacttagacctagttgattggcctgaaagtgtcaaagatatgcaacgcaactggattggccgctcaaaaggcgctgaagtatcatttgctgttgaaaaccacgacgctcagattgatgtcttcaccacgcgtgccgacacaatgtttggtgtcagctatatcgtgatggccccagaacataaattagtggccgatatcacaacgcctgaacaaaaagcagctgttgatgcttatttaaaagaaatcgaacacaagagtgatcttgaacggactgatttggcgaaagataaaacaggggcctttacaggtgcttacgccattaatccagtcaatggcgaacggttaccaatctggatttcagattacgttctagcctcatacgggactggtgctgtgatggctgtccctgcacatgaccctcgtgattgggaatttgcgaagaaatttggtttaccattgaaaccagttgtggctggtggtaatcctgaagaagctgttcacacagaacctggtgtgatgattaattcagatttccttgatggtttagacaaacaggtagcaatcgacaagatgattgattggttagtaacgcataatgctggtcatgaacaagtgagctacaagttacgtgactggttattctcacgtcaacgctactggggtgaaccgattccaattattcattgggaagatggcacaacatcagtggtgccagaagctcaattaccacttgaattaccattaacaagtgatatcaagccttcagggactggtgaaagtccacttgcgaacttaacggactggttaaacgtaaccgacgaaaatgggcgcaaaggccgtcgtgaaacgaatacaatgccacaatgggctggtagctcatggtattaccttcgttatatcgatcctaagaaccctgataaattggctgactttgataagttgaaagactggttaccagttgatatgtacatcggtggtgcggaacatgctgtgcttcatttattatatgttcgtttctggcacaagttcttgtatgatatcggggtcgtgccaacgaaggaaccattccaacacctatataaccaaggtatgattttaggcgataaccacgaaaaaatgtcgaaatcaaaagggaacgttgttaaccctgatgatgttgtcgatcgctttggcgctgatacattacgtttatacgaaatgttcatgggcccattagatgcttccatttcatggagtgaaaagggcttagccggcgcgcgtaaattcttggaccgggtatggcgtctatacacagaagaagataccgacgaaaacgaccaactatcaagcaagattgtcgctgaaaatgatgaacaattgaagaagagttacaacgaaactgttaagaaagtgacagaagacttcgaaagcatgcactttaacgtggccatttcacaattgatggtcttcatcaatgatgcttataaagttgacacactaccacgtgaatacgctgaaggcttcgtgaagttattagcgccaattgcaccacacatgatggaagaattatgggcaatgcttggccatgatgactcaatcagttacgtggactggccaacatttgacccagcagcattggtcgctaacgaagtagaagtgatcttccaagttaacggtaagttaaaggccaaagtaacagtggctaaagacacaccgaaggaagaattagaagcgatggctaaggcaaatgaaaaagtagctgaattcattgctgacaagacggtgcgcaaagtgattgccattccaaataaattggtcaatatcgtcgccaattagagtgcgtttcaaaaagagtgggttcaagctcggtcaacttttgagcattatcagagggaagcgaataagcgacgtagtcgattgtttgattcactgggataagcgcagaaagttagcttgaaaagcacgtttcagacaagagtgcgtttggttgcggttagcaactgagcattaataaaaaatttcaaataatccaggttttaggattatttgaaattttagattaagcggaagttgttgcaaccaaaaagcatgtttcaaaaaagcagttactgtttctcgcagtaactgctttttcttatttaaaattaatatttaggggcctaattatccttcaattaatataagggttattctaaagcgcttttaagatgataaaaagatgagagcgactattgcttttgggtgttttttattatacgatgataagtaaatttagattctggggttaaccaataatgatgatgctaaaatagaggggtttgaggactatgaaacgaaatttaactgcccgtcagatgcagatgattgcacttggcgggacaattggggttgggctttttatgggggccaacacgacaattaaatggacggggccgtctgtgctgattgcgtatgggattgctggtttattgctgtatctcattatgcgtgcacttggagaaatgctgtatgttgatccagatacggggtcctttgccaagtttgcaacggaatatatgcatccaatttttggttacttaacagcttggagcaatgtcttccaattcgttgtcgtggggatgagtgaaatgattgccatcggcggttacttagaattctggtggccgaacttgccgggctgggtaccgggactggtcgcgattacgttcttatgtgcggccaacttaatttcagtcagcatgtttggtgaattggaattctggtttgcgttgattaaagtcgtcacgattattctgatgatcgtggcaggccttggactcattgtttttgggattggaaaccatatgcatccagtcggcattagtaatttgtggacgcacggcttctttacgggtggctttaaaggcttcatcttcgccttggcaattgtcttggcatcctatcaagggattgaattgattgggattacggctggcgaggctgaaaatccacaatcaacattggttaaagcaattcaatccactgttgcgcggattttgattttctatattggggcgattttcgtaatcttgagcatttatccttggaatgaattgagtcaggtcggttcaccgtttgtgcaaacctttgctaaaattgggattaccgctgcagcatcaatcattaactttgtagtgattacagcagccttatcgggtgctaactcagggatttacagtgccagtcgaatgacgttcacgttggccaataatgggcagttaccaaaacgattcttgaaattaaaccgccacggtgtcccattttatgcggtcggggcgatttcattagggattttaatcggggtgattttaaacgccattttaccacttgtttatccaaaagctggcaatgtcttcgtgctcgtttatagttcaagtgtcttaccagggatggtgccatggttcgtcattttgatcagccaaattgcctttagaaagcaacacgctgacaagatggcacaacatccatttaagatgccttggtcaccctattccaattacatcactttggcaatgttgtgtgtgacactagttttcatgttcattaatccggaaacgcggatttcaatcattgttggtttaattttcttaatgatcatggtggttatttatttcgtgaaatttggtcggcaaaaatcatgacaagcaaaaaggcagcctagttggctgtcttttttttattcgattcgattggattgatttgatcgcgatgtaaaacagtgattgattcacccgctgtttggcggcgatcaatgttatcttcgccccataaacagaggagatttaagattttattgagtgactgaccgtattcagagaggctgtattcaacgcgtggcggaatttcttgataaattttacgattgatgatgccatcgttttcgagttcgcgtaattgtgcagtgagcaccttttgcgaaatctttgggatgcgttgtaagagctcgcttgatcgccgtggttggttgcgcaaatgacaaagaataacgggtttccatttaccgccgataatttccatcgtagcttcaacgccaatgttatatgttttctcattcatttctaattttgattcaccttttcattgtgataagactcaattattacttttcagtaacctactgactaaaaagtgcgtgattgtgaaaatcacgctcctattgaataatatagtacatcagtaaaaaaagtctaataggagtgtggcagtatgagtagtaaacaacgggcgaacctcacattactagcattggcaatcagtgcttttgcgattggttcgacagaattcatcagtgtcggcttaatgccattgatgattaaggattttgggattacgatgagtcaagcaggactaaccgtatcgatgtatgctttgggaattacgattggggcaccgattttggcgattttaacaagtcgttggccgcggaaaaatttattgttggggattatggttgtctttatcattggtaacttgacggtcgcttttgcgccagtcttcgcctgtaacgccgattttagaatcaaaaatgggttggtcaccaagggccgttgtgatcatcttaattatttatggtctgatggtggcttttggaaatacgttgggtggcaaatggtcaaatcaccaaccgttgatggcgctattgaaaatgtttgttggcttgttagtgaccttgttgctattcatgttaacgttaaatgcccattggttcggtttaattaacgttttattgatgggctttttcgccttcatgaacgttccagggctccaattatacattgtgcagttggctgaaaaaatcacgccaaatgatattccattggcttcggctttgaatatctcagcctttaatatcgggattacgataggctcattagttggcgggcaagcatcggcagcttggggcttagacagtacaccaatctttggcggtatcatggtttttgtcagcattctgttgacgtggtatttgattcaacaaagtaaacaagctaaataatgagatggcagagagctccgcgaaggcggggctctttttttgaaacgttctattggcgctagatttctgcgcctaactacaaaacgggaatcatggccgagtacgccataattcccgtttttaggttagtgctcaaaatctgggcaagcgctaatagcactcttattgaaacgtgcttctgatgacaacaacttccgcttaatctaaaattcccaataatcttaaaacctggattattgggaattttgtattaatgctcagttgctaaccgtcatcagaagcactctttttcataaagttttgttaaaggaattgcaaggcttggggcaatcctctaaaatggtaggaagatgctttttgacgtttaataagggagttatgggaaatgaccaattcacctgaaacaaaggcgacggatagatcttcacaaagtaagatgttacggggctccgcttggatgaccgctgggagtattttctcgcgaattctgggcgccgtctatgtaattccgtggccaatctggtttggcgcgaatttcttacaagccaacacattatttgcaaaaggataccaaatttatagtgtctttttagtgatctcgacggctgggattccaggggcgctatcgaaacaaattgcacgctataacgaaatgaatgagtatggcattggtcagcgtcttttcagaaagtcgctgattttaatgttggcaatgggtgttttatcagcgctcgcactctttgcgttagcgcccgttctagcagcgggtgatccgcggatggtaccggtcttccggtcattaagctggccgctattgattattccattgctcagtattatgcggggctttttccaaggctatgccgaaatggcgccgtctgcgatttcgcaatttattgaacaagcagcccgcgtgctgtacatgaccgtgaccgcttttatgattatgcaagtgtttaaaggcagctacgtggatgctgtgacgcaggcgacatttgccgcattcattggggctgctgccggcttgttattactgattttctattatttgaaacaacgcggtcgcatttcagagttagtggccaatagtaacaacgaattagaagtgtcaacgactgacttgttaaaagggattgtgcgccaatcaattccattcatcgtaatcgacgcaagtgtcaacttggtctatatcatcgaccaatacacgtttaatccgatgatgcatgatttcgtggttgccagtgatcatcagttgtataacttgtatgctttatttgcagctaatgcgaataaactgatttcaatcaccgtttcactcgctgctgccatggcggtcacggcgattccattgatgtcagctgcgcatgtgcggggcaatcaaaaagaattgcaacatcaaatcggcagtactttgcaattattcaacttagtgatgattccagcggcatttgggatggcggcggttgccggtccgctttacacgttattctacgcgcatgatacgcttgggattagtgtcttacaattttcatcttacatttctattatgctcggcctctttacggttttaggcgctgtcttacaaggcctctatcagaaccgcttggcattgttttacttattcatcggattcatcgtcaaaattgtggcgcagtacccagcgatttattttttccgtgtctatggcccgctagtatcgaccggcttagcctttgcgacaagttcggttttaatgattgcagcactgcatcgctattatcactttgcattacgcaaaaccattcggcgcttaatcggcgttttaggcttctcattggtgatgtatttggtaacggcgggagcagtcaaggggttataccttgtctttaacccgtacagccgtcttcagagcgttctagtcttaatgattagcgttggcctaggtgtggctgtttacgccgcgttggtgcttaaatcgcgcttagcggactatgtcattgggagtaacttggatcggtttagaagaaagttgagaatcaaatgagaattgatcgctttttaagtcatatgaatgtggcttcacgcaaagaattaaaggtactttttaaagcgggacgcgtgcgcgttgatgggactgtggtcaaagatgcgaagttcaaagtgaacgaggcgaccgttgtctatgttgacgacgaacccgtgcgttatcaaacctatttttattggctgatgaacaaaccggcgggtgtgatttcggcgacgactgatccccagaaaacagtgcttgatttattggcaccagcggacttgcgggatgatctgtttccagtggggcgattggataaagatacaaccggcttattattgttgacgaatgacggcgatttaagccatgccttgttgagtcctaaaaaacacgtcagcaaggtttatcgcgccacgattgccgggattgtcacggcagaggatcaagcgcggtttgaagcggggctcgtgttgagtgattttactgcacaaccagcacagcttgaaattctgagtgttgatgaggcgcaacaagaaagtcagattaccgttgagattcatgaaggtaaattccatcaagtgaagcggatgtttcatgcggtcggcaaggaagtcttgacgctagaacggcttaagatgggaccactggcattgccagatgatttagaccgtggccaataccgtgcgttgacggatgcagaactttcattacttaaagcgaattaataaacagcagccctttcaaaaggaatgctgtttttttaagattgatgaatcattttagccatatagtgtggtaaggtctgaatcacttggctaggaagtgtgacgtattgggttttggcgagttcatcagcaatcgcactgtgggtataaacagcggcacaaatcgtctgatagtgggtgccaaattgaccacagaatgcggcaataataccagtcagtgtatcgccgctaccgccagttgccatggaaggcccaccgatggttagttgctgaacctgttgctgatgatagacctcagtgtgatgttttttaagcactaaagtcgcgtttggataagcagcgagtgcggcttgattagcagcaaccgtttgctgctcgattgcaacaccgctgaggcgcgcccattccatttgatgcggggttaaaatgagttgcgtattcgggatcgtcagtttttcatgtgcgatgattgatagtgctgaaccatcgataatcagtgtttgtgttggttggatggtttgtaagatttttctcagcagttcaacggcaaacgaagtaatgccaagaccaggtccgacaacaacgacatcagcagcctggactgcagacgaccactgcacgaagggttgttgataatcaatgaacatggcttctggtaagcgcgcgtgcagtccgctgagaacacttaagtcactagcaacggaaactaatccagcaccagcataaacagccgcacaggcactcataatcgcagcaccgccgtattgctgactaccaccaatgattaagacgcggccaaaatcgcctttatgactgatggcaggccgtgcctgcaggaccgcacgaacggttgaatttgtgatgacttgcatctgaatccctcccttatcaactattattataagcgaaatattaataaatgggtattggcagggctctgtaacactggtacaatagtcttgtagcacaatcgcccgtgtggcggaactggcagacgcgcagcgttcaggtcgctgtttgggtaaccaagtacaggttcgaatcctgccacgggcattatggattaaaaaaggatcgctatcactttagatagcggtctttttttgttcaaaaagtacatcgattattgattatttacctcattatgactggtttagccaatggattagcgacaattattagcactattcaaaaaaagttgcatcaattttaaggaattaaaccattagtagaaaacgatagctttaaataaatattttcttatcaatataattattatttgaactataaaaacggctgaaagctacaagctgtaaactgcatcgcgattaaaaggtcatttaataaataaaaacatcacaaacttggcgaatttcaataaaaaaatattaatagggttaaaacttattaaaaatatttttttgtcaataccgttaatttcagctatttacatttaattaatttatataatataatgcctgtggagcagagcaggattactagttcgcatattgtaggtcctcaaaatagatagaaggagtaatgcttattatgaataatcaattattaatgctcattaaatatcgtaatattttggatcaattatttgtcacagttttgcaaaatgttgacttatcactcgaacaatatttgttgatggaaaaaatggatcgtgaaaaagaagaaacgcccggcaaccttgctgcttgtatgggcgtttctcgaccagctatttcccgccaatgccaatcgttgggtgaaaaaggattaattgaacgggctaatgtggggagttttattggtgatagtcgtaaagtatactatcgacttacaaccaaggggaaacagttattattaaagattagactaaacagtaatgacatgattgatagtttggattctggatttgttactaccaattgggatgaaattgataaccaaattgcgctaatgtccgacgcggttaaaagaacattcaatatcaatgagattcaaatcttttagagagactatcggaatctgaacgggggagttatttagtttagcgcgtgttaatgggcaggatcgaagcgatggatgtcgagtatgattatttttgaatgtaaccggttgcgatgaattggcataaacggtatattattaaggtatctaagggataggagagaactaagcatgacaattaaattaatcgcatccgatatggatcataccttattaactgagagtggccagttgccaccaaactttataccaaccattcagcaattacatgctaaaggggttcaattcgcagctgccagcggtcgaccaatgtacacgttaaagcaaatgtttcccgaacttgctgacacaatggtttacgtcagcgataacgggggtgcaattggttatcaaggtgaaactttattcaaaagtttattgccgttagctgattaccaacggatggtccaattcgttaatcaaacgccagatgggattggcgtgatttgtgggatggacgcggcgtacgttgaaacacaatatcgagattatgacgcgactttgcggcaattctatgccaacattgaatatgtacctgatttaacgcaggttagtgttgaagccaacaagtttacgatttatttcccgggaaaagatagtcaagcacagtatgaagctgttttcgcacccgaatttgaaccggcttattcagtaacggttgctggtgttgaatggatcgatattatgaatcaaggcatcgacaaaggccatgcaatgcgctttttggcggattatttcaacatcacgccggcgcaaatgatggccttcggggatacttataatgataaagaaatgctgcaaaccgttgaacatagttatttgatggggaatgctgccgacgatatgatccaatatgcgacttatcgtgccgacactaatgagaactatggtgtgttaaaggagattcagaaattactttagtcaaccaatcgtagatgaattggtaatgctgggtagcatctgtttctaataaaatttcatgcgctgtatgaggtagaatgcgcaccgttgcgttgttaacggtgcgctttttgaattggttcgttaaatgccgcgcgcggcgaccataaccgccagctggatcgtcggcgccactcattacgagaactgggcgggattgtaaggcaagttgccaatcagcatgccgagttaactcagtgagggtgaagagcattgcaaaaccgctatttgaaaagacgtagccacacaatggatgctgttcgtaggccgccacgtttgcttgattgtaacttaaccatgaaaaaggtcggtgagcatcaaatcgtttaggatagaccccaaacgccaagttattccagacagtaccggggcgcttagctgcaatggcgccgattaatttaacgattggtaaggcgggtttaagaatgaagggtacatcgataacgcccatgaagatggctccagtaatcggcacttcagtttgcttaacatattgtgtcgctagcattgagcccattgagtgtccgagcacaaataatggtagctctgggtattcctcgtggacaatgcgaccgattaaggtacaatcgttgactagcgtctggagcccgtttggcccgaaataaccgagctcatcgttggactgaatggagtggccttgcccaatatgatcgtgtccgatgacgataatcccacgatctgctaagaattgagcgaaagcatcataacgttcgatatattcggccatcccagttagaatttggacaactgcgaccggtttttggattggaaaccaagtcacgacatttaaagtatggattcgatcagtagattgaacggtcaatttttgcattggttagcgcctcccgaaaaagataacgtactttacgattcattttagcagaaacaatctagagataccaaaaggacgccaaacaactttaaccgttgtttggcgtcctttttagtcatgcttaaagttgcacatcatcgttaattcgtgttgcgcgtgagaagtatttcgaatagaagcgactgataattccccaatagtaaaagatgagggctaatgcgctaattaagacgaaatcgagtgggtaaggaatcaggttaattccgttgaattcccgactgcccaagaatgaaatcagcgaaagcaatgcgagatagataattaaccataagcttcctttgaattgagcccaagtattttcccagtgaatccgatactcatagtagaaataaaatggtaagccaagcataatgacgccaatcaccttaatggttgttggccacattgcccagtaagttgccaaactggcaaggacaaaggataatggcgacatgattttcatccaaggtgactgaacagggcggttcatatcaggggccattttacgtaatgacatgacggtgaccgggccggttaaataggcaatcaacgttgcggttgaaatcacgctggctaacgttccccaacttctaaaaattgaaacgagtagcatgctgacgatggcgttaatgaccatcgcaatgcgaggaatattatattgttcgttcatgcggccgacaatcggtggcatgtgtttgttctgctttaatgctgctaatgtccgtgcacatgaagcgacaaaggaaacgccggtcccaaagggtgaaacaaacgcatctaagtaaagtaagacggctaaccaatggattccaagtaaaatggctaagtcggcaaagggtgattggaagtttaaaccgtgccaaccgactttggcgagcaaggcgggtgaaacagaaccgataaaggtaatttgcaagagtagataaatcacaatactgatcccaagtgaaattgcaattccacgtccaatattccgtttagaatcacggatttcactgccgacattgattactgtttgaaaggcattgtatgaaaagataatcccagaaatcgaagtggctgcaaaaattttggcggaaccatagggcataaacgtcgccattgaatgcccgaagttgccagtatggaaaccagttgagactaacataataatggttaataatggcacacctaatttaaagattgcaatgaagctggtaaaacgggtcaagaatttaacggaccagaaatttaaaagggtgaagacgatgataaaggcaaagacgacgagcaagccacgattcgaaatttcagcgtggtgcataaagtgattcgtccagttagcccacgcccatggccaagaactcatatactggacagcagcgacggcttcgattgggataatcgtgactaatgatacccaattggcccacgctgcgatgaagccgagtaatgaaccgtgactatattgggcatagtgactcatcccgccactttcaggaaacatcgtcccgagttcaacgtaattaaaggcaattgcaccaatcacaattgcgccaacaatccaagagatgatggctgctgggcctgccacggtcgttgcctcccatgcaccaaacagccaaccggaaccgatgatggaacttaaaccgagcatcactaggctaaataaactcattttgttcttctctatcataaagacctcctgtgtatggtgtgccattatagcaaccatcaccgttggtttcaaattaaaaatacggctaaaatgagtcgtgaagtctatcaaattaacaatggtaacgccttctgaattaattattaacaattaaaaaaaccgtcacaaaaagtgacggttgaatagttaatttaagtcaattgccccgttgaatggcatccgtttgtttaaaaagatttaatttacgatcgttccagaatgtttcagacatatcgcgatagaagatcgcagtctgacagcctgggcaacgcttgataccatattcaattggcgcctgacatgcagggcaatgaaatgcggttgattcaggaattgtattttgcgaatcggccattaaaaggactccaatcaagttgttatcaatagtataccgcatacatacgctatttgttaagcgtttaaacctttttttttcaaaaaatatgcacaaatcggaaataatatgctatactatatcaagtaatgcgagtgtagtttagtggtaaaactcaagcttcccaagcttgcgtcgcgggtccgattcccgtcactcgcttaaagattcatgcaaaagaggttgcaacagaagaaattttgttgcaacctcttttttattctctgaaatttaatcctcggcggatacccgacttacatcacactcttttcgttatcagacctaaggccgattgtttgtttaaaggcgctctgataaagtatatttattatctatcgactaaaaaatcgtgatacttacgagcaatctaattagtgggagcgtacgacattgacattattagagattaaagatattcacaagtcctattatatgaacaagactgaatttaaagtcttaaaaggcatcaatttaagctttgaccgtggcgaatttgtttcaatcctcggggaatcaggcggcggtaaatcgacgttgctgaacatcatcggtgggttagatcaccaatacgatggggagctcatcgttgatgggacatctttaaagaatgcatccgaaaagaaatttgatgcttatcggagtcaaacgattggctttattttccagagctttaatttaattagtcatttgactaacttggaaaatgtgatggtgccacttgaaatgactgatctatcacataaggaacgggttgccaaagcgactgccttattggaacaagttggcttgaaggaacatatccataaacatcccaaccaattgtcaggtggacaaaagcaacgggttgctattgccagagccttggctgctgatccagatgtcatcattgccgatgaaccaacgggtgcgttagatagccagaatacggccgagattctcgaaatcttacaaaagattgccaaagatggcaaactcgtcatcgccgtaacccattcacaagccgttgctgaccacggaacacgggttgtccacatggttgatgggcagattgattatgacaagcaattaaaaccagcttacccagctccaactggtccggtaattaagaagagtagtccattaagttttatgtctgctttcaaaatggcaatgcaacacatgcgctacgatattaaacggaatttgctcattatttttggcgcgtccattgggattttctccgtcattttaatgctaggcttgggtcaaggggtgactggctatattaatgatcagatttcatcgcaagttaatccaaatacgattcagattgcaagaaacctcacgcgcaaacagattgaagccggtgaacaaggtaacttagctgataaggatatcaaccgccttaataaggtcaaaaacgtgacgaaggttgaaaagggctactacatgaatggtgtccaagtgcactatcaaaagaagagtgaaacagtccaaatgttccaaacgtttaataaaaccgaacgtgtccaagatattaagaccgggactaaacctggggccaacgaaattattttaacgaaggcaatggctaagaagttagataaaaattacaagaagatggttggtcggacagtaaccatttacgtcaatgccattagtaaggatcaacgtccagttcaaatgcgccaagatgtgaaagtttcagggatcatcaattctgggactgaagccgtcacatatggcacattagccaagatgtaccaagcgcaaggattagagtttgcacccaactttgcagcagtcacggttaataagacccaaaatgttaaagccgttcaaaataaaatcaaaacctacactagcaaagtcaacggtaagacacaaaaggattaccaaatcacaggggttggtgcgatcctcgattcaattaacacttacttgatgttagccttctacgtcttagctgggattgccgggatttcattattggtttcagcaatcatgattatcgtggtgctctacatcagtgtgtcagaacggacgaaggaaatcgggattctacgcgcaatcggcgcccgaaagaaagatattcggcacttattcgtctcagaagccttcttgattgggttattatcaagtgttcttggtgccggcattgctggccttggacaattgcttgtcaatacgttggcccaaccattaacgcatatgccaattgtggcaattaccagtggctacgtcctattcgggataatcatcagcattatcatcagtctcttagcggcactagcaccttctcgtaaggcagctaagttagatccaattgaagccctcgcggcagaataattgcgcttgaaaagtgcagctaagttctatatactagttatcaagttcgaacagtcaaaagaatagcatcaacagcgatttatagcgagctcacagacggtgtaaggtgggtaatcaagttgacgcggcgcgcttttggttgaacaattgcatactattgagtggatcgattgatcaatcagagtggtaccgcgggaattctcgtctctttcatttatttggaagggactttttttgttcacaaatattaggaggctatcaacatggattttaaacaacaagtcaccactgccttaatgggcgttttaggggacagtttaccagcagataaagtagcacaactcattgaaacaccaaaaacatcagacttaggggactatgcttttccaacgtttatcttagcgaaaacattacggaaagcaccccaacaaatcgcccaagacttagtcgcagaaatggatcaagccggctttgaaaaagtgattgccaacgggccatacatcaacttcttcttggataaggctacgtttagcgaccaaatcctcaaaaccgtcttaacgcaagccgctaattacggccaaagtgacctcggtaaagggggcaacgtgccaatcgacatgtcatcacccaacatcgctaaacccatctcaatgggccatttacggtcaacagtgattgggaactcaatcgccaagattttgacaaaagtgggcttcaacccaattaaaatcaatcacttgggtgactggggtactcaattcggtaaattaatcgtagcttataaaaaatgggggagtgaagaagaagttaaagaagacccaatcacgaaccttttgaaatattacgttaagttccatcaagaagacgttgaacatccagaattagacgatgaagcacgggcatggttccgtaagcttgaagccggggatgaagaagcaacgaagttatggtcatggtttagaactgaatcattaaaggaattccaaaagatctatacgatgttaggggtcgaattcgactcatttaatggtgaagccttctataacgacaagatggacggtgtggtcaacgcacttgaagcaaaagggctcttacaagaaagtcgcggtgctgaaatcgtcgacttaacagcttacaacttgaacccagccttgattaaaaaatcagacggcgcaacactctacatgacacgtgatttagccgctgcgatgtatcggcatgacacatacgacttcgtgcaatcattgtacgttgttggtggcgaacaacgggaacatttcaaccaaatgaaggccgttttaaaagaaatgggcaacgattggtcggacgaaattcaccatattccattcggcttaattactcaaggtggtaagaaattatcaacgcgtagcggtcgtgtgatcttattggaagaagttttaaatgacgccgttaacctagcacaacaacaaattgaagccaaaaaccctgatttaccaaacaaagaagaagttgcaaaacaggtcggcatcggtgcggttattttccatgatttgaagaatgatcgtttagataattttgactttgacttagaagaagttgtgcgtttcgaaggtgagacaggtccatacgtgcaatacacaaatgcccgtgcccaaagtatcttgcgcaaggccaaccaagaagtcgcaatggacgctgacttagtcgtttcagatgccaacgcttgggatgtcttgaagatgctcggcaacttcccagatgtgattgtcaaagccagccaagaatacgaaccatcagtgattgccaaatacgcattacgcttggcaaaagccttcaacaagtattacgcaaactcaaaaattttggcagacgacgatcaaaaaaatgcgcgtctttcattagtgaagagtgtcagcacagtcctagaagcctcactagacttattaggcgtacaagcaccaaaagcaatgtagagtgcgtttaaagcggtttgactctgagcatttgcctaatatcgtgaataagcgacgcagtcgattgtttgcgatatgtagcaaagcacaagagtcagctttaaaaagcatgtttaaaaacagagtgcctttgaaacggtttgaccttgaggattaacaaaaaaatagcgattatggcgggttttagccataaccgctatttttaggttaaccggaaaggtcagtttcaaaaagcacgtttcagatcagagtgtgcaagcaggcggttatatttgagcattaactggatttggcgaattgacgatgtcatcgtcgatttgataaatttggttaagcgcaggaatatgcctggagcacatttaagccacccgattaaatcaatctggtggcttttttatttttcgaaaaattctaattcgatgacaaccccgccaacttccgttatagtaatcttgaaatagtgggggagggttcactaatggtattagtcttaaaacgccagattaaagggattccggttttggaagtggtcgctgacgaacaacgtcatcagccattaccactcgtgatttactatcatggctggcggtcagcaaaagaattggttttaacgcaagcgcgtaaactggctgaagctgggatgcgcgtggtattcggatgcactgaatcatggtgaacggctgcaacctgtttcagagattccgtcatggactttttggcaaagtattcaaaccaaccttgccgaattcagtttgattgttgattactggcaccaacttaatttaattcaagctgaccgcatcggcgtcgggggtgtttccatgggtgggatgacaacggcggcactcttaaccaagcatccagaaattaaagtggcggcttgtatcatgggctcgccggcaccgctagcctatgcgcgcttagttcgtgaaaatatccgtgcgcatcagttagcacaacctgacgatctagggttattgacaagttggttaacggcctacgatttaactgaacagccgcaggcaattgctcaacggcctgttttattctggcatgggacagcagatgaacgaattccctatgaacaagtagcagcttttgaacagcagattaaaggtcaaacttatgccaaaaacgtgacatttttaacagcaaatggtgaacgccatctggtgaagccagcgctgatgaacataattacagatttttttagtacgcaactataaaataaatcatttttaaaaagccaacgttaaattcttagcgttggcctttttgacgtgttttatttcttggaatattaaaaaaataatgatttataatggggattaaaatacgaatttagacgactttttcattggtttggtatagcgggaagaatgctttttattatttgtataatacgtgttgtatgcttatcggtctaattgtttatcgcagtaatatggattttatgtgtcgataatatttatggaaaccattatctgtttattatatacggagttgatgaagcgtgttaagttaaatgtgttccaaaaataattttttaggagatgagactatcaaaaaagtagtaggtattttagcgttcggcattttaacgaccagttgcatgagtattttacaagaagcaagggctacgaccagttctaattaccaaagtaagcaaagtgaggtgcttgatgatagcctccaacctaaggtgaggcaccagaagggtgtaacacgttcagaaaaggcgccatattcaaaactgtatattggccgcggtgatgttaataaagaattggctcggcaacaaagggccttgagttattcaagcttagagccttccggattatacgccaaaaaaggggacgtgctgacggtgagcaaaacgggtcaagacttgatgtcgctgacgattggctcgcctgagcgagatgttcagaaacgatatccgctcgtaaatggggtgacgactattacagttgaaaatgatggccctatttatgtgacgaatccaaatgattcaggcggtactagggtgtcaatctttgatgccactggtgaaatgccgttctttgatgcaaacaagacgagtgtcgaagattttaagaaacaaatgactgaaatgacagacgcaaaagatgttcaacttgttagtgatcgtgctttaattactgtgagttatgagatggcaaagaaatatttgggggatcccaaagcgttaatggctaattatgaccgattcctggtcgctcaagatcgagtttcagggatcagtaatgaaggtcggccggttaacttttcagatcgccatttacaacatttcttagaatcgccatcgtattatatgtatgcgacaaacgaatacatgggttttaaaggcgatgcagctatgaaaagtttattagaacttcaggacccttggggaatctggcatggaagtggtcatcagagacaacaaaaactatggacatggagagaagttgtcgaatcgagtgttaatatttattcgttagcagcgcaaaaagaaatgacgggtgcgatgcctgatttagataagtattatccagaaatgcacgcctatctaatttctgatcataaaaacttcaatcaacaaggggactttgtcaaaatgacaatgtttgcccaactagcaaacacctttggcgatgatttctacccgatcttacatcagtattatcgcgaaaatcagttagcctatgattcaaatgaagatcgaatgcagcattttttgttacatgtctctgaagtaacgggctataatatgctcccttattatgaacaatggggatttaaagtttctgaagaagtacagaagaaaatcagcaactacacaacttctaaaactcgtcttaatatatttcatgattttttaccgttgaactactcattgatttgatactcttctaaaacaattggtatcgatttctattttgataatatgttgaactactcattgatttgatactcttctaaaacgtgaagcgttcccagaatcattaggagctagttgaactactcattgatttgatactcttctaaaacggaacggctgaaagataacattaatagtctgttgaactactcattgatttgatactcttctaaaacgtctaggtggcataaaaaacagttctgccggttgaactactcattgatttgatactcttctaaaacaataagcctaggtggtgcagtgtttaataagttgaactactcattgatttgatactcttctaaaactggttaacatattaaagacctccattttctgttgaactactcattgatttgatactcttctaaaacggagtctgtttttaataaattcgttggtaagttgaactactcattgatttgatactcttctaaaacgaatgttgagacacacaagaaactgattaggttgaactactcattgatttgatactcttctaaaactgacacgataataaataatgtctaaaagcggttgaactactcattgatttgatactcttctaaaacaatagcctaggtggtgcagtgtttaataacgttgaactactcattgatttgatactcttctaaaactagcggtcttggttttcaatctaccgatgagttgaactactcattgatttgatactcttctaaaactcttaacagtcacggttgcagtaccggcaggttgaactactcattgatttgatactcttctaaaactatcagccaggttattgaacgtgactttgagttgaactactcattgatttgatactcttctaaaacagaaggtgaagatggacgtgaaaagtgtaagttgaactactcattgatttgatactcttctaaaacaaacactcagattaatctggtcagacgttagttgaactactcattgatttgatactcttctaaaactcagggtacagtaaaaggtatgtgaaccttgttgaactactcattgatttgatactcttctaaaactagccaaccattgatctgttttttcgaacagttgaactactcattgatttgatactcttctaaaaccaatcgagcggaaaaaattataaaaaactggttgaactactcattgatttgatactcttctaaaaccattcatagctttactctcctgtggtttgtgttgaactactcattgatttgatactcttctaaaacagctggtgctacaggttgtgtcggagttgagttgaactactcattgatttgatactcttctaaaacaatatgcccaacccagaaaacgccccccgggttgaactactcattgatttgatactcttctaaaacttaaacatactgatcgaatgcctgaattaagttgaactactcattgatttgatactcttctaaaactgaaactacacgcagactagaagatgataagttgaactactcattgatttgatactcttctaaaaccatcgttttttcatcagaatttcattttattcatagcgccattcgacataatcattatcgatgtgataataataacatttctggtactgatcagatttaacctcttctgaaaattcaatgagaaagagtttcacattcaatgtcgccaccaacctcaccaattcattaaattggttgatactgagatagtgcgaaacgttgatcaacgtgattatttttgattcatttaactctactgctgtctgtactatactctcaattataccatatgggtcatgttggacgacagtcgaaaattgtaaattatagaacttaatcattctttgaagatcccattcctgattgacatctaaggtcaattcatacataaaggccgcatccaaaatcgttgaacgaatctcactatctaactgagttaatttctggcgctgctgatccgttaagtcggcggcgaattttttaatcaaccgattttgaaatagatgattcaaattaattgctgccacatccccaccccaaataacagcctttgaataatccattaattcgtattgatcattgctaaatttaacggtctcttgtgcgccggacattccaataatgagtttggtatacacttctggactacttgtactgcaaaccgttattttcttattctgaacgctaaaggggtggtatggataaaaagtaatgttcatagaattaacgtcctctcagcagaattacggacgtcatcactcgattcgcccactaagaaatgcattttattatattgttgctcagtaaccatcaacgtttgtactaagcctgcaggcggagtaaagccagcaattcggttctcgataaactgcgccgattgtttgctgacacaaactcgaacataaacagaatattgaatcattaaaaaaccttcgttaagcagcgcttttctaaaatgacggtatgccttgcgatcctcgctcgtttcaactggtaaatcaaacatgactaataagcgcattattcggtacctcgtgagtcattaccacctttacttcaaactcttctttcggagttgtcatgaatttcaaacaattctgtacgtgtttagtgagtgcgtttctaagaattgtgatctgtccattatattctagctcaagattcagtaactccactaaaccaaatttaacatcaggggttaattcattaaacttttgatgtgccacccaataatcaatcactggtcgaaaaggttccattagatcggaacccaaattaaaatcactgacgccattgtgatgatgaatgccaaactgtgttaaatagccattacaaacaatttcgcgattaacggctgataacaacaaactataaccataattaagggctgcattaatgggactgtactccgttcgaacaaagtctttatcaaaaactaactgaaaatacttgcgcgcaatcacggcttctcgatttgttcgatcagcaaataccattgcatcagcttctgttgttaagtcttcaatatcctttcctaacaattgtgcacattgaatttgcatcgctattttggcttgaataatcgccgtccataaggtttctttcaaccccgttccccattcaacctgttgctggatcgacgcgagactacgatttcctggataatccgcaattgtttcgcaagttggattaccgtctttgcctgtaaaaataatcttagcgccagcttcactcaactcagtaattgccgatgccgttaaaacggcctgggtagtcgcaactaacaaaatttggatatcatcaattggtacttggtgtgttgcatcttttgtctggacaataatcttccgtccagaataagaaacctttgcatgttgtgaaatcacaactgttcgccaactcataaaaatttaccccctacatccttgttttcaaaatgataacatgctataatgctgttgttgagcttgatacactcaatcgaaatactcattgatttgatactctgagttaaaatcaaacaaggtcttcggaccaagttttctattctgagcctcttatgaggcctttttttatgccttcaaaccaaaaagctagcccatcattacactaatgacaggctagctttatttatttataaatcccttaaagctactcgtcgttcgaataaaccggttggagattgatagataatttgggtatcagccgacagtgtaattcctgtggattgctgtatcattccaaatggcgtggtcattttcaatactttaagatcactcatcgcagcatttgcatgtaatccaattagaattctatccaatataacctgttgcccaacctgcaccatcttattaccatcccattgactcttccatggtaacttcataaaggctgctttacccgtagataatttagctctgaattgattagtatcatacagtgggaaatagtgcatcacttgatctaagatttcatcataaacttgttcagcgagttcttcagactgtgttaaaggtagcgcgccatttaataatttaacagccgttttatcgagaatcagttcctgctcgttgtgtttatacgtcgcagagcccaatgtcaattcttgaccattatcgaagaaacgttgattgattaggatatgtggtgcaatgacttcaaagtcttcgaccactttcacaatcgttcctttttgttttttcacttttgtaaattgcggactaattttttgctttaagaatgccttttgtgagtcttcatccgtcagttgtttaagttgcgctagccaacttgtctcaacaccacagactttatagagatcaccctttttatttttaatgcgtacaatacacatgtaggcaacggtcttccctgagtacccaccatagagtgcagttggtcgatcttgtttagcgggaatcaattgcttgccgccctgaccacttgctttatcatctttagccgcatagagcgtttgattaaatagtgctcccgaattttcatgcactccgcgggtcactagaatcttcttaaactgatatattttattcaagtaagctagaccggattctttatcccaaataaccgcttcagtattttcatcaaccaattcgtctttctttagaccatttaaaaaattaaagttacgccacttatcttgctgacttgccttctgatactcaccgtatacaaaataaggttttaatttaggatagcgcttcaatagatacagaccaacgaatgcggtcagataagcatcgaatgcatgatgatggttatttagattacgattcttcggaaaatcaaattccgttcgcatttggtgggttaacccactcttaaccgtaattaactcaatattgtcttcaccatattgttccatcaatagatttgtcgctaacttaatgacttggcgtgtttctactaattgccggttaataaaacccttcattgcgtatttactgatgtgatcaggatttaacgttaagttatcatattttttcttggtaattaacccagctcgcaacatctgttcccattgaatctgcatcttttgtccaagttcgacacttgtaaagtcggtcggtacttgatctgctttactacgattcattttttgagaaactaatacccgattatctagtgagttgtccttaataaacgattgtggcaaaatatgatcaatatcgtacgtcgataaacgatcaatattcaacgaatcacccgtatacatatcccgaccaccctgcatgaagtacaagaataagcgcgtattgctcaatgcagaattcgataaatccttaagttcatttctgatttcagtattatttagcaattcattgctgatattttgatagacttgttcaacttggcgcttacgttgcaccgaaagtcgtggattcacttcatcttcgcgcgcaaattcaatcaatatccgttctggcgcctggcctttcatggccttttgaatgtcattgacaacaagcagaatctggcggagcgcttttttattctgtggtgacgtatataaatcattgataacatcttgtacatcattttcagctagaatcatttgattagcttcagtaattaatttatcaaagtcttcagagtgcacaatccgcatgaagttatccgttgtatcccagagtaagtccataattcgttgtccattcgcattgacgatttgcgttaataatttagccgacaaacgaccccaaccgcggtagcgtttagcagctaattgcacacgttgctgatccgttaaccaatcgatttcattcaatttggcgctatatattttgccgtcttcaaaaatcgttgaccattcaatacatttttccaaatcggcttgtttatcaacatcatcaaccgcatctccaacaatcatctttaagtcatgatacgtgcttaatcgactattaaatttgttctcatcggatagaccagtaattgcgggacgacttgcatagcgcttttctgataccaagtaatcctgaatatttttcactgttacacttattttttgcataaataaatccgtaaatattgcttgtttcaactccgtcgtaatcggttggtcatcaatcttaagtccgtttaattcattcaacacttcaaaccgttgataaattaagctctgtttagggagtacatcttcagccaataaataagtatcagtcgttgtcatgcgcttaatgaattcattagcggatgcttgacggtccactttatcatcgaagttccacggtgtaatccggccttctgctttacgaatcatccacgcaaatttcgcatcggagctttgtcgttgctgctcagccgtaatcaggggccccacatagtatggtactctaaaggccactaattcgtccaatttatatttagcgactgtttgccgtttagaattgggattaagttccgctaaccagggatagtattgttgttggttctcaataatccggtctaattcctgttgatgtagttgatgcgggattgccccattatctttggtccgttgttttggcataaattgatcaagttcaattaattttttaatttcactcacaatcggatgatctgggttgttctttaaggcttttgtgatatctccgtaaaaatcttccttcgaataggccttcgtattttcttgaccatcaacatattggtcataagcctgctttaatctctgtcggtctccaggtgctaacgcttcccgtaccgcttttagcatttttaaatgcttttgatgatcgtcatacttcgtgatcatcgcttgcgacaatgattgattttcgggaacgattcccgccaatagaacaccagaataaagttcctgtaggctttcgataatttgatgggcattatcatcaagactactctctaacttgaccatttcttcatcaaagttttctgcattaaaagtgagtgtccatgctttaacatcttcggcttcgatcccagtaagcacattaaacttcgcttttaaccccaagattgcttttaataattctgtcgcaatcgccttattctgcttttcaactgccttattcgtacttggcgtataaatcagtgataatgcttgtctttgccgattgctagcactttgttgattatccaataagagcgctttgacctccgccaatttatccgtctctagttgaaagccagattcactgaacaagtcagcaaaaatcgtgtttagtctgtcaaaatgagccactaaattaatttcgctactcttaaaggatgagacgggcgcttcatttaaaaagtgcccgcgatacttcacaatatgatgcatcgctaaataaatctcgcgaatatcaaattgacgtttctcggtcattagcttatatcttaaatggtaaatcgttggataatcgtcatagaatgcccgatctgttcgatcattaaataaacttgtctgtggatataactttcgctgatccttcggacttaggtttgattgtttttgccgcaagaaaaaagtatcatcaaccggcgtgatatagggttcaaagatttctcttaacaatcctaaccgccatttacgtcgttttaatcggcgacgtgttgttctaaagctgcgccgttctgcggttgtttgtccttcatcgtataaacgaaccccataaccatatttacctcttacactgaccaacttactttggtcatcaaccactgaccacccaattgaactagtaccaatatctaaaccaatattatacggacgactcattcttactccccctaaaagtttatattcaatgatagtatatccaatttaacccgctttttccaattaagttaagaattacacatgctaacagcaaaaaaagacaagtcttaatgacttgtctttgatcattattcaactggtaacactgcgccgtgccatttattcttaatccattcttgcgttgattttgatttgagcgctttaacgagcttcttgatagctgggttattgcggtcttttttatttgtcacaacaatgttggcaaatggcgaagattgcttttcaagggccacagcatccttttcagggttgagaccggcttgcacagcatagttcgagttaatcgccactaaggtgccttcatcattcttcaaaagttcaggcatgagttttggttcgaatgtgtactcaaacttgaggtgtttgggattgctagcgatgtctttaaacgttgcgttttcagcatttacgcccgatttcaaggtgattaagccaccgtcttttaaaattgttaaaacacggccccagtctggctggctgcttgaaactaatactttcgcacctgatttcacatcactcaattttttaacttgtttactgtataagccgagcggttctaagtgaatactgccaacactgactaagtcgtagccgttatctttattggccttcttcaaaaagggtttgtgttggtagtagttcgcatctaattcgccactcgctaaagctttattgggtaaaacataatcgctgaagacttttactttgaggttgatgccttcttttttcaactccggttgaacgtgtttcaaaatcgcggcgtgtggaattgcggatgccccaacgacgattgtgttgctgtctgacttcgcttctttgttaccacaagcggcaagtgcgcccgctaataagaagactgctgctaataatcctaaactgtgttttttcatgaaaactcctccttttaaattaacgatgatcaatgtgttgaacaaccaagtcgcccgttttttgacaaatgaagacgatgattaaaataatgacggttgcgactaacgtaatcgcattttggttagcttggaacccatcttggtaagcaagatttcccagtccaccggcaccaatcacccccgccattgcggtataaccaacaagtgaaattgcggtgacggttaagccggaaacaagcgccggcatgctttctggtaaaaggacttgccagacgatttggacttttgaagcgcccattgaacgggtggcttcaagcacaccgccatcgacttcccgaaaagctaattcaacgagtcgtgcataaaagggcccggctgagatgattaacgctggaatcgcagctttcgggccaatcatcgtgcccatcaagccttttgtcaatggaatcaacaagacgattaaaatgatgaatggaatggaacgaaagacgttcactaataaagccacaatgccattcaacagccgattcactcgaccaccactcgcgtttgtttgataaagaactaacccgagtgcgaatccaagaactgccaccaataaaacactgacaattgttaaccaaactgtttcaaaagttgcttgccacatacttggccagttcacttgcttaaattgaaaataggattgaaatccgtttacgttatccatgacgtaccacctcaacttcgattgtttgttgtgctaattctgcaaggactgcctttaaatcacttggattagcttgaatttgaatgtataaatagccaagtgcgccattaatggtttgttgtaaactcccactgatgacactgatttcgactgctgggtattgacgcatcaagcgaccgatcaccggttgactcgattgttcttcgttaaatcgcagttggacgattgtgccatttggaacccgttctaacagttgatcaatcgaagcggccgtttcacttggcgacaccactaaggattcagcaacaaatgccttagttgcagccatttgtggtttttcaaagatttcgtgcacagtcccttcttcgattaaccgcccattttccatgaccgcaattcgttggcaaatccgccgcaccgcatccatttcatgggtgacaagaacgattgtaatccccatttcacgattaatcttagccagtaacgttaagattgaattcgttgttttcggatcaagggcgctagtcgcttcatcacataacagaatcttcgggtcactaatcaaggctcgtgcaattgcgacccgttgtttctgaccgcccgatagttcgcttggataggccgcttctaaatgggtcaattcaacaatctttaataatgcgcgggctttgatttgtcgttctgccttaggtaccccggctaattttagtggcaacatgatgttttctaacactgtctttgaccagagtaagttaaagtgttggaaaatcatgccaattttctgccgaatcggccgcattgcttgttcgctcaaccccacaattgactggccctcaacgagcacatccccagtcgttggcttttcaagtccattcaagagtcggatcaacgtactcttaccagcgccggaataaccgataatcccgtagatttcgcccgcttcaatgttcaacgagacatccgttagtgcggcgaatgttttttgttctcgctcaaaggttttacccacttgttttaatgtcaacatactcatcgctccctcttcttttaaaaaatgccaaaaaaaaaatccttcctctcaaataaatgagagaaaggacgctaaatgcgtgttaccaccttaatttacgattacctcacagtaatcgccttacaaagtacccgattgatactcgtttgctatatcgggcaacccccgcattcggctcagttaaaccttaccaaatgaattgctcaaagaccatatttatctagctttcacattatccgcttgcacctgaccggactctcttaaaatgctactgactaaattactcatcttttcatcgcttgtattaagtagtacctatcataattaaagttcaattaaaagtcaagcaagactattcaaaaaaatcagattattgtttaagtaatggcctaatcgacccgaatgtcagcaatccacgcatctttttcgttatctgcatttaataattccggattatcagctaacggtgtgttgacgtttactaattcaccagctagtggactgtcaagatcttgtaccatcttctcagcttcaatggccactaaggtttcattagccgtcaatttttgccccacgattggaacatcaacaaacttgattaacccaaactcattttgtgcggctttggtgatcccaattcttctaatcgatgctgcaatttcctctgtccaaaaataatcattattattcatcgtcatccgtcattcactcctagaaagtatcttcagcttcactgaacatgtaactcttataatggtaccgcatcgacatgataaacccaacgccaattaggttccccaataatgacgagcctccttgtgagatgaacggcaatggaatccctgtcaatggtaataaaccaacgctcatcccaatgttttcgaaaacatggaataagatcatcatgatgaccccagttgagacatacgcgtaaaattcattcttcgtatcaaatgtgacccgaatcatttggtaaatcaacaagaagtacaaaagaatcacaaaacatgaaccgacaaagccgaagttctcaccaatgacagagaaaatcatatcggattcacgtactggcacatggacttgcacttgattgaagcctttcccaaatagctgaccagacccaatcgcttttaaactctgcgataattgtaaactggtactggcagtattatcaaaaggatgcagccaagcatcaattcgattgaattggtacgttttaaagcccagatgcgtcaagattacccggccaggggtcgtcgccgctagtgtaagggccgtgcccccaacagcgactaagacagcaatggctggggctaaaatcttccaggtcacacctgagacaagcacaatcccgcctaagatggcaacgaacactaataaggtcccaaagtcattttgtaatttcaataggaccatcactggaagtgtccatagtaacattcgtccaagtaacatccaatccgtcttaatcgtgtgttctggataagccgtattgtgttgagtaacgaccctgcccaacatcaaaatatatgccggtttcatgacttcagatggttgaaatgagattggtccaagagagaaccaactctttgccccagtttgcaaggcgactgcccgattataaaagattaaaacggcaatcaagaggaaaatccctaacccataagccagtggtgcaatccgccatagttgttctgaatcaaactgcataattgcgacaatcgcaattccaccaatcacgtaccatgcagcttgcataataacggctcgagttgaactcgcacctgatgtatcatgtgacgttgccacatagattgacatcaagccaatcaacgctagcataaagactgaaaagacgattccataatcaactcgcgaggaatcttctgttgtttctacttcctttggcatgctaagtctccttcaatcaattctgctctcattatataaataacccggccagaattctgccgggttactgtaattctaattaattcttaagaattaaccttggtgtaagtggtactcccgtagtaattcgttaactgcatcgtcgtgggtcttagtaatgatactttgaccagtcccttcaacagttgcttcaaaacgtttcttagcgctatcttctacaatcacgccaatttcatttttgccgaccatgacgcttgtcatttcttggccattacgtttgatgtcatcaattgtgacagtaattttttgttctttttttgacatagttatgttgaacccctaacttctttgacttacttttgtgactcgtcttgctgtcgattgcgcaaaacggtgaaatgatctggtactggatcatagccgccccgtacaaacgggtgacaacgcaatatacgaccgatgcccatgattaaacccaaaatagcaccatgtttttggattgcttgaatcatgtaactcgaacatgttgggtaatatcggcaactcggtggtaataatggtgaaattcccttctgatagaaacggaccaatccaatcaatattttccgcaatttatctacctcactttagcgcatgctactgcaagaaattaataatatgactccatgtgctaggcaagaaaacggcaaatggattctggccgccaattgcaaaaccaatcatctgaccaactaataacgcaataattatgagcacgaaaaccaataaaattttctttaaaacgggtttgacgtgttcgtcaaaatttgattgatacacacaatcacaatccttctttaatagaatgcggcttaataagcgcgtttatgttcaatattatctaataagatgccagtccctaaagcaacagcatccaatggattttctgctaagaccaccggaaccttcaaatgttctgagaataagctagcgatattgcgtaataaagcaccgccacccgttaacatgattccccgatcaataatatctgcagataattctggtggtgtcacttctaacacttctttggcagccgcaataatttccatcattgtttcatgcaaggctgattcaacttcatctgcactaattgagacagattgtggcaacccacttaccatgtcccggccacgaatctcaagtgactcactcgcatcggcatgccaaacgttaccaattgttaacttaattgtttcagccgtatgttcgccgattaatagattatgtttcttcttaacgtatgcggcaatttcactattcatcttatcgcctgcaagacgcaatgaacgacttgtgaccacttcacccattgaaagcacagcgacgtcactggtcccaccaccgatatcaataaccatgttaccgcgtggttgaaaaatatccatgccagcacctacagccgcgacttttggttctaattccaagaagactttgccgccacctgatttttcagcagcttcaacaattgctttttgttcaattgatgtaatatttgttgggcagcaaatcaaaatattaggttttgataggaagccctttacatttaatttattaataaaatacgctaacatttcttctgtaatgtcgaaatcagcgatgaccccatcctttaatggacggacagcgtggatattgccaggtgtccggccaaccatccgatacgcttctgagccaactgctaaaacttttttggtttgggtatcaatcgcaacaactgaaggttcgtttaagacaatgccttttcccttaacgttaattaagacgttggcagttcccaagtcaatcccgatatctttagccatttggtgttgctccttccgagaactatattcagtaaatcattataccataagacaggtacctttagtatcctgatttggcaaaataaaaaagcgacgtccgctgaaatagcaggcgccgccagtctgttttatgcacgttttgcttgtttaatccggtgaccggcagcatcaaaatcagctcgactaatatgtgccccaagtgcccgtaatttttgatggaaatgatagtaaccccggtccatgtattgaaggttcgtaaccaacgtttcaccattagctactaacccagcaatgacaagtgctgcggcagctcttaaatcggttgcagccacttcagccccattgaaatgtgtatcgccataaagcacaactgattgaccttcaatttgataatccgcattcattcggcggagttcttccaaatgcatgaaacgattttcaaataccgtttcggtcataacactcgtcttcttagcaagtaattgaagtgtcgtcatttgtgcttgcatatcagttggaaagcctggataaggtagcgtcttgatattacatgcctttaattcagcgggaccaataattcgaacaccagcttcttcgtcaatcacttccgcacccatttccactaattttgataggagtggtttattgtgttcagcaatcgcttctttaatcaagacatttccttgtgttgccgcagcggctaccatgaaggttccggcttcaatccgatcttgcacgatactgtgatccgtcccgtgtaaagcggttacgccttccacccgaattgtctcagttccggcgccaaaaacgttcgcacccatcttgtttaagacattagcaagatccacaatttcaggttcacgagcaacgttttcaatcaccgttgtcccttcagccattgtcgcagccatcacgatgttttgtgtcgcaccaacactaggaaaatctaagtaaatattagttcccactaggcgttctgctttagcttcaatgtaaccataattttgatgaatggttgcaccaagtgcttcaaaacccttcaaatgtaaatcaacaggccgcgaaccgatagcacaaccacctggcatcgcaactcgtgcgtgacctaagcgcgctaataacggccccatcacaacgatggaagcacgcatttttgaaacatattcaaaagctgcttcaaaattcaaatcaccactggcatcgattgttaattggttccgttgttcatcaaactcaactttagcatctaaactctttaatacatcttgcatcatgaagacatcagataaaataggaacgttcgttaattgaacgggtccgtcggttgctagtaaggcagccgccataattggtaatactgcgtttttggcgccttcgatttgaacttcgccaactaatcgttgaccgccttgtataatcaatttttccaagagtttccctccgaataagactgctagtttatgggactaaaaaaatcacatttttagcctgcgcgattatttctaaaaagaattggctaacggtgtagcccatcacaatagcgagaaatactatgacaatctgtacttgacggatatgattcggtttgaaaaattgctcaaaccggattgattgtaagccataaaaactgattaaaataaaaccaatatggctaataattgaaataactgcctgtaacccgattgattgcacttaaataacgccccttttgtgatatgcaaacattgtaacataccgaaataggatttgtctgcccaccagactgaatcttaagaaacaaaaaaagccttaaaccattcaggtttaaggctttttgaatcctacaataagtgattcttaacgttaatccggtttatcgcacgttgcagtgcaatttgagcccggcgtaattcgtcagtatcattatgttcggacgctgttttaattgcgttttgagcacgttccttggcactttgcgcacgcctaatatcaatatcacgcgcccgttcagcactatcggcaacgattgaagcaacgttatggctcacttccatgaacccaccattgaccgcaattgcgtcttcacgtgctggatcatcagtccgtttaacgcgaatctcaccaatttctaaaggggtaataattggctcatgattagccataataccaagttgcccggccatcgctggtacaaccaacaatgttgcgtggtgatcatagacaatcccacttggggtcacgatattaacggttaataccttttgttcttctgccatcattaacgcccctttctaagcttgtttcgtttcttgttcggatggtgtataacccaattctttagcttttgctaatgcagcatcaatattcccgacaagccggaatgcttcttcagggacatcatcatagtcacccgctaagatgcctttgaagcctgccactgtatcttttactggcacgtatgagccggcttggcctgtgaaggcttcggcaacgtggaagttttgtgataagaagaattgaatccgacgagcacgcgcaacgataatcttttcatcatcagataattcatccatccctaagatcgagatgatatcttgtaattcacgataccgttgtaagacgtgttgcacttctgaagcaacttcgtaatgttcttcgccaacaatttctggatccaaagcactagaagttgattctagtgggttaacagcaggataaatcccctgttgtgttaatttacgatccaagttagttgtagcatccaaatgcgcgaaagttgttgcaggcgcaggatcagtataatcatcagcaggcacataaatggcttggattgatgtaactgaaccttttttagtagacgtgattcgttcttgcaattggcccatttctgttgccaatgttggttggtaaccaacggcagaaggcatccgtcctaataaggcagaaacttctgaaccagcttgagtgaatcggaaaatgttatcgatgaacaataacacatcttggccttcaacatcacgaaagtattcagcaattgttaaaccagtcaaggcaactcgcatacgagcgccaggtgattcattcatttgaccgaaaaccatcgctgtcttttccaaaacgcctgattctttcatttcaaagtataagtcattaccttcacgtgttcgttcaccaacaccagtaaagacagaaataccaccatgttcttcagcgatattatggattaattcttggattaaaacggttttaccaacaccggcaccaccaaacaaaccaattttcccacctcgtaaataaggggcaagtaaatcgataaccttaatccctgtttcaagaatttctgaacttgtatttaattcctcaaatttaggtgcagaacggtggatactgtcccgtctaaaatctgcaggaaattcttcgccgccatcgattgtttcaccaagaacgttaaatacccgtcctaaagtttctttaccaactggtacgttaattgcacgaccagtgtcttcaacagccatcccccgacgtaaaccgtcagttgattccattgaaatagtacgcattaccccatcacctaattcaagtgccacttctaagacgacagattcgtcgttccctttgttgacaaccaaggcattattgatatctggtaaagtcgtatctaaagaaaattcgacatcgacaacgggaccaataacttggacaacttttcccatactcatagttgttattttcctcccgcgtttcttattctaatgctgccgcaccaccgacaatttcggtgatttctgtagtaatctgtgcttgacgtgcccggttaaatttaattgataaatcagaaattaaattattagcattatcagtggcactcttcatcgccgtcatggaagcagaatgttcagctgttttagaatcaagtagtgcgccgtaaatcaaactttcagcgtattgcggtagaatggcatctaaggcatcatcaacagaaggttctgtgatgtattcttgatctttatcagtgacttctgaaacatccaagtcggtaataggtagcattttttcagctcgaaaagcagatgtcagtgagttgacatggtggttgtaacaaacgtacaactcgtcaaacacgccgctatcatacattgcaacagctgttttgataatttcacggacttcattaaatgatggcacatcacttacaccacgatattcgtaggataagttcatttgccgtgctttaaagaaatcagcaccagtgccaccaacggctaaaatagcatattcatcggcagacttgtggttttctgaaatcatttcaaccattgcttttaagattgagctgttataagcgccaaccaatccacgatcactcgtgatgaccaaataaccggtctttttgattggtctttccactaacaaattacttaacgtaatgtcatgccgcaatgatttctgtgaagtaccgttagtagcttctgctgctttagcggtacttttttgacgtgcacttgcaattaattgacttgcagccaaatgcgtgacgatttctcgaatcttattcgtatattgttgataagcgattgaatttttttcaatctgagaaagttttgcaccagagaccatttgcatagcactcgtaatttgcccagtttttttagtagaggcgattcttcgtttgatatccattaaagattcagccaattaattcaccccttactgtcctgagtcttgattgtcagcagtagcttcagcgccgacaaaaccttctgtgaaggatttgatagcagcatctaacttatctgtatctggcaatgcagcggtttgacggatagtgtccatcaagtcctttgcgttactttcaagataatcgctcaattgactttcatattgcatgatatcgtcaactggaacgtcatcaataaagccgtgtgttaatgcataaagaatcgttgtttgttgttcgaatggtaatggtttgtgaagtggttgtttcaaaacttcaacagtccgtttaccacgatttaatttcgcttgtgttgccgcatccaagtctgaaccgaattgcgtaaaggcttcaagttcacggtatgatgaaagatcaagacgtaatgtcccagaaaccttcttcatcgccttcgtttgcgctgcgcccccaacacgagaaacagatgacccagcatcaatcgctggacgtgttcctgaatagaataaatcactttccaagaagatctgaccatcagtgatggaaataacgttagttgggatataagctgagatgtccccagcttgtgtttcgatgattggtaaagcagtcattgaaccgccacctaattcatcacttaacttagcagcccgttccaataaacgtgaatgtaagtagaagatatcaccagggtaagcttcacggcctggaggtcttctcaaaagtaatgaaatttcacgataagcagcagcttgtttacttaaatcatcatagacgattaagacgtgcttgccgttatacatgaattcttcacccatcgctgcaccagcatatggtgcaatgtagagtaatggtgctggttgactaggaccagcttcgacaacgatggtataatccatagcgccgtaacgacgtaaggtttccacttgcgctctaacggtcgattctttttgaccgatcgcaacgtaaatacaaatcatgtcttgatctttttgattaataatcgtatcaatcgcaacagatgttttaccagtcttacgatccccgataattaattcacgttgaccacgaccgattggtaccaaagcatcaatggctttcaaacctgtttgtaaaggttctgaaacagattgacgtgccataacgccaggggccttcttttcgattggacgagttttgtccgttttaatttcgcctttgccgtccacgggttgacccaatggattaacaacacgaccaattaaagcatcgccaacaggcacttccataatccggcctgttcgtttaacttggtcaccttcacgaatgttttcatattcacctaagatgataatcccaacatcgttggtttccaagttttgcgcaaccccgtatgaaccgttagaaaattctagcaattcacttgaaagggcgttttctaaaccgtgagcacgtgcaatcccatcaccaacataagtgacagtaccgacttcttcaacggctaaatcttcattataatttgcaagttgttgtttaattaatgcactgatttcctcagttttgatgctcatcaggttcacctctttatcaacgattgactatttcaatagtaatgacttaatttgatctaagccatgtttaacactgccatcgatcaccttgtgattcgattccagtacaatcccaccaataatatctggatcaacgatactttccactaagacctgattgagaccttcgcgtttagcgtagctttggctaatctttgcgatttgatcaccatctaaagcaacggctgacgttaccttagcgtgtgcaatccccatcttttgatcataaagatcttcgtaggccgcaataatgtatggcatctcagccattctttgatagtcaaaaacaaggcttaaaaagtgttgcatgagtgtactaaattcaccggaaaggctctttagaagctcacgttgtttcaatccagataaagtcgtatcagtcagaactgcacccaatcttgggttgtcattgaaaatagtctcgagtgcttgtatctcttcatggatactttcaaattgttgctcttgttctgcaagggaaaataatgcctttgcatagcgttgtccgactgcatatttatctagtttcattttgcttgtccaacccttcaatataggaattgatcaatgacttttgatcagtaactgacaattctttcttaatgagtttagaagcaatttcaatagatagttgagcaacatcatctctcgcactgtttaacgcatctaaacgagattgttcgatgtcttttttagcattttgttttaaagtttggacttcttcttgagcaagtgtgaccatgccttcgcgttgtttttcaccatttcgcttagctgtattcacaatttcaactgcttctgacttagaattcttcaactctgttgcgcgttgtgctgctaatttggcagcatcttcacgtgattgagcggcgttatctaagtcgtttgtaattttgtcagaacgagcttgcatcatttttgaaacaggtccgaacgcaaatttaccaactaaagcgactaaaatgataaagacaactaatacgaaaagtgaatctccaaggtaggcttcagaagcaccaacgattaaattactaaacatctattgacactccttccttgacttactgactaatttttaaagcgaaaatttagattcactcggattaactaaataagatcaagaaagaaacgacgatagaaagaattggaacagcttcaatcaacccaacaccgataaacattgttgagcgtaattctgctgataattctggttggcgtgccatactttcgattgtttttgagataaccttaccgttaccatatgatgctgcgaatgctgctaaaccagctgcgatagctgctgctaaatagttcatgttttttcctcctaatttttagtcttccatttcaactttttctgaaatatagactatcgataatgttacaaatacatatgcttggattgccccgataaagacggagaatccttgccaaaccatttggatcggtgccgtcacaagcatcgttgctggtccatgtgagaaggccattttaactaataaacttagtaaaacttcacccgcaaaaatgttcccgtacaaacgcaaggacaacgttaagaaattggtaaattgttcgatgatattaattggtaagaaaaatcctaccggtttaatataactcttcatgtaattaccaaaccctaaccgttcaacactaaagtagtgcgcaatcactaagacgatcatcgcaagcgacatagtgataatcggattggccgttggactcttcaaccaagttacatcatgtaccttaatttgaagaatcaaaccaagttgattactgataaatacgaacatgaacatgacgaatgcaaataagtaaaattgtttaccttcttcaccgggcatcgcacttttaacgattccgttcgtaaaatcaatgatccactccaaaatattctgccgtttagtcggtttaagcgcaatttttcttgataaaaagaaaacgagtgcaaaaaccaaaactgcacttactaagaccgatagacagtttgctaaattaaaacgaattcccaaaatgctaataatgggatatttatcatccacaaaattccctcctcccttaggcttatttgttgattccactctatcaacgactacgtctacgcgagttgcacaacgaacctaaaaacagcaatatttatgtagaaaaattaagcataaatcatcaccgcaatacaagtatgataataccaccattaaattaaaagtacaaagcaaatactaactaatttctaattatttttttgtcaatgcactcaaataccataaatattatcatatcaaaagattaaacttattaacggttgcttttttggcaaaaaaaacgcgtaacacaggaaaatcaagtgttgcgcgcttttattatcggtacctaattaatggctatttagtcccgaaaagacggtcgcctgcatcccctaaaccaggaacaatgtatccatcctcgtttaaatgatcatcaagaccagctgcatagatgtcaacatctggatgggcttcttgaacagctttaacgccttcaggtgcagccactagtacaacaaggcgcattgacgttgcgccgcgttttttaagggcatcgatggccatgattgctgagccaccagttgcaagcattggatcaacgatgaatagttgtcgttgatcgatatctgttggtaatttaacaaagtattcgtggggttgtaatgttttttcgtcacggtacataccaatgtgaccaactttagcggctgggattaattctaaaacgccatcaaccatcccaagacctgcacgcagaattggcacaacggctaattttttcccgctcaattgtttttcaattgcaggccccattggtgtttcaacttctacgtcttccattgctaaatcgcgcgtgatttcataaaccattaattctgcgatttcgtttgcgacttcgcggaaaactttagtacccgtatccttattccggataatcgttaatttgtgttgaattaacggatgatttaatactgtgaattttgccatttactttgcccctattctattcaatgaatttagtccaaatttttttcgcaaaaaaagagtgactccaaagaaaaccttctccgagtcactctcccttccgcgtaaaattctgtttactattgtagcgtaaatagcatcaaaaaactagcggtattcattaattaatctaaaaatttagcttgtgtgattggaaaacgatccgtcaacgctaaaacatctgcactaatgcgcgtcatggcgtctaattgatcgtgtttttcaatcacttctaaaattaattgcgcaatcaattcacaatccgcttctttaaacccgcgcgatgtgattgctggggtcccaattcgaatcccacttgccttaaatggacttaatttttcaaaaggaatggtattcttattaacggtaatgtggacactatctaaaaatgcttggacttccttcccatttaagccactctgcgttaaatcgagtaacattaaatgattgtcagtcccgcctgaaaccacacgtactaagtcagattgttcgaaaacggcagccatcgcttgcgcattggccacaatttgttttgtatatgctataaattcaggttgtaaatcttcaccaaatgcaacagctttcgccgcaatgacatgttcgagcggtccaccttgaataccagggaagatggcagagtcaattgctttggcatattctgctttacacaaaatcattccaccacgaggtccacgcaacgttttatgcgttgttgtggtcaccacatcggcatatggcactggacttggatgaacaccagttgccactaaaccagcaatgtgtgccatatcgaccattaaataggcaccgacatgatcggcaatggcgcgtaaccttgggaagtcaattgtccgactgtatgctgatgcccctgcaacaatcattttaggatgaatttcatccgctttagcagcgagcgcatcataatcgattcgttcgttatcgtcagcaacgccataactatagaagtgataaagttgcccactgaagttaaacggtgacccatgggttaaatgaccgccatctgtgaggttcatccctaaaatcttatcaccgggttctaaaagcgcttggtaaactgccatattagcctgcgaaccggagtgcggttgtacattggcatgttctgcattaaaaagttgtttagcacgttcaatcgcgagtgattcaatttgatcgataaattcacaaccaccgtaaaaccgtttgcccggataaccctcggcatatttattggttaatacgctaccttgtgcttcttgaacagctccggaaacaatgttttcagaagcaattagttcaatattatgcacctggcgttgttcctcttttttaatcaattcgtaaatttctggatcagtttgttcaatcatttacaatcactcctcttcctattaaaatagtgcctatttcgaagtaaagtattgttggccggcagacttctcgaggcgattcatatacgctaatccgacaccctcttttgcgaagccttgcactaatataattttaacctcaggattcaaatcaaaataccgtaatccttcaaacaagtgttgactagcagtcactacagaatcacctaaagagaactgatctttaaacctaacgtcagataactgccctaacaccgtatcaaccgccataacaccaaatggcacactttgttgactggcccatttaaccgccgccggaaattcatctggcgttggcactatgtaaacctgtgcatttggagcatagtgtttgtatttcatgcctggtgcctttggcgtttcagctgcgccaactttatggtggtttgtcataatcggcccaatcacacgttcaatggcttcttgagtcacaacaccgggtcgtaaaataacgggtgtcgcaacacttaaatcaatcaccgttgattccaacccaacaccagttggaccatcatcaatgacaccggcaatctttccatttagatcatgtaaaacgtgatcggcagtggttggactgggcttgcctgatgtattggctgaaggccccacaagtgggacaccggccgctttaatcaagtctaacgtcaccgcattgttcggcattctaaaggcagcggtctttaaaccacccgtcacaactgaatctagtgccgcatgttttagcggcaaaataattgtcaatgaaccgggccaaaaagcgtcgactaattgcttaaatcgatcactaacttcggctgcgtaatgctcaaccgtcgcaacacttgctacatgcacgattagcggattatcacttgggcgccccttagcggcataaactttcttaaccgcttcaggattcgtcgcatctgccccaagaccatagacggtctcagttggaaatgaaatcaattcgcccgcttttaaatctgctgctgcttgttcaatctgttctactgtgtatctcttggtttccattataggccttccttactctacttctgatttacatcataccaaattccgattgaaatcgtaacccacacgggccattctagaccaattagccatatcttttttgattgtaaccgctacatcggtcgattcatgttcgaataaccgaacgatcgcctctttttgctgataaccgaactctaaataaagctgcccatctggttttaaatacgcacgcacttctttagcaaaccgttcataaaacgctaagccgttattatctgcaaatagggccaagtcgggttcgtatttcaaaacggacgcatccatcacatgccgttcatcttgtgcaatatatggcggattagacacaatcacatcaaactgttggcccatcactggggttagaaaatcacccacgataaagttaacatgcgcgtttaattggcgcgcatttgcttgtgcaacagcaatcgcttctagtgaaatatcaattgcggtcacttcccattctggatgctcacaggcaagggtaattgcaatggcgcccgttcctgtcccaacatccaacactttaagtggtcggttctttggttgtgtagcatctaatatccattctaccaattcttccgtctcaagtcgtggaataagcgttgccggcgtcaccttaaaatcgcgtccgtaaaaattagcatatcccaaaatgtattgtgccggttgatcagcgataaacgcgtttaagtctgcttgatactgatcgtattcggcagtcggcatttcatcgtgataatgcaagaccagttgggtcgtcgtccaatgtttacgaccgagtagtaaaaagcgcgctgcttcacgttctttagcgtgttcttctaaaaataaaaaagcccaattcagggctttaagataagtgagctgtgccatcttgtaattgctccaatttttcggtttgatcgtaaagaattaacgcatcaatgacgtcgcctaattccccgttcataatccgatctaatttgtttaacgttaaaccaattcgatgatccgtcactcggttttgtggatagttatatgttctaatccgttcagaacgatccccagacccaaccgctgacttccggcttgaatcgtattcactttgattttgtgattcatagaaatcataaacccgtgactgtaagatttgcattgccttcactcggttttgttgttgtgaccgttgatcttgcatcgcaaccacaatcccggttggaatatgcgtcatccgcacggctgaagaggttttattgatatgttgaccaccagcacctgaggcacgataaacgtcagtccgaatatccttaggatcgagctgcacgtcaaccccatcatattcaggcataactgcaacagtcgctgttgaggtatgaacacgaccttgtgattcggtctttgggatccgttggacacggtgcgcaccattttcatattttaacttcgaataaacatttttaccggtaatcatcatcgcaacttctttgaagccacccacttctgtagccgtttcatcgatgatttcagtttgccagttttgtgattcagcgtagcgttgatacatattcaacaaatcacctgcaaagagactggcttcgtcgccaccagcagccccacgaatttccatgatgatattcttttcatcgttaggatccgttggtaacatcaaaatcttgatgtcttgttctaattgttccttttcatcttgtaactcacttaaatccgctttagctaattcttccatttctgggtcattagattcgcgtaacaattcttcgctttctgcaatgtcgtttaagacagtcttcaaacgcgtgtatttaccaacaatttcccgtaaacccgcttcttctttagacaattccatataccgactggtttcgttgatcacttctggatcagacattaattcctgtaattccgcatagcggtctaacaaactatcaagttgttcaaacattttatccatgaatgactagccttccttttcactctcttgtgttaccggtgggttaaaatagtgtttccgacaaacggggtagtatgcttcgttgcccccgatttgaatctgttcacccgtataaaccggtttgccatcgttcattcgcaagttcataatcgcttttttgcgacagaaccaacagatggtcttcatttcttcaatcttattggcaaatagcaataagtatttcgagccttcgaataattcattcttaaaatcattcttcaacccaaacgccatcactgggatattcaaatcatcaacgacctgcgccgcttcgattacgtgatgccgttctaaaaattgtgattcatcaatcaagacacacgctgcatccggattagtcgattgtaccaactcaaagatattcgtatccgagaaaatcggtgtcgcctcacgtttgagcccaatccgacttgaaacaatccccaccccgtcgcgattatcaatcccactcgtcaggatgatcactgatttattctgctcttcataattgtgtgcgacttttaaaatttcaatcgacttaccactattcattgcaccatatctaaaaaataattgcgccactctcaaacacccctatgttaagcacattttaatctagtatacctgaaaatcagcgaggcaacaatattcgccactattaaattctaaagtttcccttattttatttgcagatgcgtttttatatcgtccaaattgagaatttatgctatgattatgaacattgaaagggtggcaagcatgacaattaaaagctcatttgcaattacagcaggacgtttttcatattggtatttacatacctttatgaaaggtggcagctccctccccgggaaaatcgcaaccaagttcgatcctgctgtgttaaagcagttaaccaagaactacgacgtgattatcattaccggtaccaatggtaaaacattaacgaccgcactcactgtgcagacgttgaagcaaaaatacgatcatatcatgaccaattcgagtggctcgaacatgatgcaagggttgaccaccgcctttttagcagatcatcctcaaaaaagacaacggcaattggccgtcctcgaagtcgatgaagccaatgtggaacccctttgtcactacatcaagcccaaagcgattgtgatgacgaatattttccgtgatcagatggatcgtttcggcgaaatctacacgacttataatatgattctagcgggcgtcaaactcgttcctgaggcaaccctcattatgaacgctgacttacctctcttttcatcggttgaacttcctaatccaaagatttattacggattcaaccacttaccagatggcgaaatgatggctccaagcaacacagacggcgttttgtgccccgtttgtgatcacatcattcattacaaattcatcagttatgccagccaagggaagttttactgccctaattgtggctaccaacgacctgaattagacgaagcagtcactgccatcaatcagatgcaccccacaaattcacactttgaaattaacaacgaaccgtttgaaatttcaattggcggcatgtacaacatctataacgcacttgcagcctatagtgtcggtcgattctttgatattccagtgaaagcaattcaaaaggccttcactgaagacaaacgaatctttggccgtcaagaagtcattcaattaaaagacaaagcggtcacattggtactcgttaaaaatccggttggcttaaaccaagtcttacaaatgatcagttctgatccagaagacttttcactcgcaatgttgcttaatgctaactatgccgatggaattgatacgagttggatttgggatggcgagtttgaagacttactcaaacacaacattccaaccgtgattaccggtggcgaacgcggtgacgatatcgctttccggctaaaagtagctggtgtcacggcagatcaattacacgaaactaaagaactcgatgcaacgatggcagccattgaagcagccccaaccaaacatgtttatgtattagcaacttataccgctgttttacaactacgtaagaagctggcagctgccaattatattaagaaaggactatcagtatgacccagacattaagaatttgtcatctatacggcaatttaatgaacacatatggtgatcttggtaatattttagtccttgattactatgccaaaaaagttggcattcaaactgaaacagaagtcattagtatcggtcaagatttcgatgcaagtcgttacgatatcgttctcttcggcggtggccaagacttcgaacaaaaaatcatctcagaagacctcaacgacaaaaaagcagccctcaccgaatacattgaaaacggtggtgttatgcttgccatctgtggtggttatcaattattaggtcactactatattggcgcaaacggcgacaagattcctggaatcggcgcacttgatcattacacattgagccaagataacaatcgttttatcggtgatattgtcatcgaaaaccgtgagtttaacgaaacctacctcggttttgaaaatcacaacggccggactttcttgggcaaggatgaaaaaccacttggttacatcaaacgtggtcacggcaacaatggtgatgacggcaccgaaggttgtgtttataaaaacacatttggttcatacttccatggtccaattctcacgcacaacggtgttttagccaaacgacttttatcgattgctgttagccggcgttttccagaatttgatttacaacaaatcgctgacttaccactcgaagaatcacgttaccaagtcgatgcagccggcgtcaaacgcgtccaaaattaacaaatcaaaaagtcgaccattatgcggtcgacttttttgatgtcttaatcatttcgcaagaaaaaatacactttttattcataaaatgataatcgtttcacaatacttgctcggtatactgactttaacctataaaaaggagcgaatcattatgttaaatcaaatgccagcagtcgagtccgttcaaattaatcggattgaaaatcatgataaagttttcgcaaccactgaaagtggtcaagaaatcgaattacatattaccgaccaacaaaaaaaggaccgcctcttctgggaatccctcatcaatatcctccgcgctgaattgtggttacccctgcaaaagagaacccacgaactactccaaaacgactggctaacggtcgatggctaacgtgtggctctgggttcggatgacttacagaacacgtttaaacgatcagaacacaactatccaaaagggcgctaacaaaaatattgttaccgcccttttgcatatcaatgtttcgttttttagcgttgccctgtccactccgctaaatactgatccacaaactggtgcatgaaatccgttcgcgcttgcgcgatttcgcgcgctgcctgtgtgttcatcgttgctgccaatttaaataatttctcataaaaatggttaatcacggtagacggttcgcgatagttttcctttgtcaattccgcccgtggttgaatctcaggatcataagcaaccccatcctgtgcgccaccatacatgaaggtccgcccaatcccaatcgcgccgattgcatctaaccgatccgcatcttgaacgatttgcccttctaaacttagcgtttggtgttgattgagatttttcgaaaaggacatgtggtcgataatatcaaaaattgccgtttgttggccatcttgtatgccgttttcggttagtttagtttttaccttttgtcgagcctgttcaacatcagtcgcgattttttcatcaatcacatcatgcaataaggccgccaagataatcgttgttaggtccgcagctaactctttttgctgaattaaacgggcattattcacgacccgttgaatgtgatcgaatccatgaccgctgtgttctgctgccaattccgttcgtacaaattgttcaattgcttcgatttgtctttgcatacttgtcatcctactcttttaatcattaaaaaaattgcaaccacggctgcggttgcaattggttatattcagtttacttattacccggttctgacgcaataatttgcatgtcaccttttaagtcccatgacttaatatcaaatggtaacacaaaatgcatattcttgtgaattgggtaagtttgcccatcggcaatcagttcgccttcaccatcgaccacggagactaaagtatagggtgccgttgtccgatcaaagtgtaagtcgcccttcactaaccattggtaaacactgaaaaatggtgacattggtggttgcacataagtcgtgattgttgaatctccaacatgttctgtttgaatattcaaaacgggatcttgatgcggcacaatcgtcgtatcaattgattgcttcaagtgtagttcgcgtttttcgcccgtcttagcatcaacccgatcataatcgtataaccgatatgttgtatcactactttgttgggtttcaagcgccataatccctttgttcaatgcgtgaatcgtgccacttgggacgtagaaaaagtcaccagtcttaacgggcactttgcggagtaaatcatcccacttgcctgcttcaatcattgctgttaattccgctttggtcttggcatggtggccatagattaaataagcacctggttcagcatccaaaatataccaacattccgtcttaccgagttcggttggaccttcatgagcagcagcataagcgtcatctgggtgcacttggacagaaagacttgcttcagcatccaaaatcttagttaacaatgggaatactttaccttctgcattaccgaaatattcgcggtgggttgcccatgcttgatctaatgtgagcccttttaatgggccattttcgatggtactaggaccatggggatgggctgaaatggcccaacattcaccaatatcgccgtctggtaaatcataatcgaaggcttcagctaatttgcgaccaccccaaattttttcttgaaaaacaggttttagaaataaaggttctgtcaattcactcactcctaatgcgctttatttatcaatagtcccattttaccacaaatgtaagcggataatacgcaaatttgcgaatttgactaggcttttgtttctaggtgattatccgctaaaaattgtgccacaatcgcatcccgttgttccaaaaagaccggattatcagccgttggatgaatgcgattactcaggacaatcagccccgtttgccgcttgcgatccaatagcatgaacgtgccggtaaaaccggtgtgataaatcagtggctggtgttcttgcggctcaaagcgcaaatcccagcccagtgagcgcccgagatgttttggtgtccaatcacgatagagactcttaacactcgcctgactgattggtggctggtcaaccttcaactgccctaattggaactgggcaaagcggacaacgtcttttaatggagcaaacaagccggctgcaccactatgattttgtaaaatcgcacttttcggatcgtggacagtgccctggattaagccgcgttcggcactcaattcagtcgggaccgccaaacttttgtccggattaaacgtactggcttgcataccgagtggggttaaaacgagttcttgaatcaaatcctgaatcggtttttgatagatggcttcaatcatccagcccaaatacaacatatcaatgtccgtgtaaacaaccttttcaccaaaatttgggccgaccgttaattgcgtcaaaagcgccgtttttaattcggcagccgataattgattccgattcggaatgtagcccgttaaaccggacgtgtgcgtcaatagatgcaagaccgtcacccgtcgatctttaaaggccggcaacaaactatgcacttttgttcgtaaagaaagccgccctttttccaatagccgcaaaacaatcgtcgtcgtgccaatcactttcgttaatgacgctaaatcatacaactgatcagcttttaacggcactttttggggcactaattcggcctgcccgattacattagtcatcacttcagggccttcgatgatggcataagaaacaccagggacaatcccttcatcaactagcgctccaatttgccggatggtttgttcaaatcgcatgttaaattcctcctactacatcaatatcactagtatacgccaaacacggacaaaaataaggccgcagattttatctgcggccttatttgcgtcattcatgattaaattttaacgttgcctgagaattgactattgtacaagtcagcgtagaaaccatcttgtgccatcaaactatcatgggtcccggtttcaataatcgaaccgtgattcatcacgatgatgttatcggcatcgcgaatcgtcgataaacgatgggcaaccacgaaactggtccgattttgcaacaagcgttccatggcgtgttgaatatgaatttcagtccgtgtatccactgaactggttgcttcatccaagatcaaaatctctggatcggcaacaaaggcccgcgcaatcgtcaataattggcgttgaccttgggagatattcgaagcttcttcattcaagaccgtctcatagccatcaggtaattgacggacaaaaccgtcaacgtgcgctgctttggcggctgctaaaatggcttcatctgaagcatcagcgttcccatatttcaaattatcccaaatcgttccagtaaataaccaagtatcttgtaaaaccatcgcgaagtgacgccgtaattgttcccgagtcatatcgcgcgtatcgacacctttaagcttgattgaaccgccactcacgtcgtagaagcgttccaacaagttaatgatggttgttttaccagcacctgttgggccgacaatcgcaatcatttgacctggtttgacttgcaagttgtaatccttcatcaagatatctttaccttgataaccgaattcgacatgttctaattcaagtagattttggtcatcaacaatcgctggcacttctgatgggtcgtcactcatgtcatcttcatctaagacttcaaagacccgttcagctgaggcaatcgttgattggattgtattcgctaagttggccaattgcgtgattggttgtgagaattgttgcgtatattgcatgaacgcttgcatatcccctaaagtaacttggccgtgagaaacacgaatccccccaacaattgctacgaagacgtaaccaatgttattgacgaacgtcattaacggcatgatgactccagaaataaattgtgccttccaagctgctttatagagtaatgcattttgttcttcaaaggcatcaattgtgacttgttcgcggttgaaggtctttaagaccacttgaccagagaaattttcttcaatttggttgttcaacaaccccaaacttttttgttgcgctgcgaagaatttctgtgatttcggtgcgacaatcccgacgacgactaaactgagtggaatcgtgactaaggcaattaaagtcaattgccaactaatcgagagcatcatccacataacgccaataaatgtcacagcactcgttaccatttgcgttaaactttgttgcaaggtacttgcaatgttgtccatatcattaatcgcacgactcatgatatcgccgtttgagtgtgtgtcgtagtaattaatcggtacccgttgcatcttgtcttttaattctttccgtaattcatagacggtttgttgggaaatccgcgtcatgatgaattgttgtaagaaactgaaaaccgctgatgctaagtacatcaaaatcaccgtcataataatgtgttgaatcttatcgaaatcaattggtaagccattcatcggcatgcccgctttttgcatggcattgcccttcataacacccttgaagatttcggtcgttgcttgtcctaatacttttggtgttctaatttggaaaataacggagatgattgctaaggctaacacaatcactaatccgattaaccggctagacatgtaggttaataatcgtttggttgtgccccaaaaattcttcggtttttcaacgacaccacccatgccacggcctgggccatgtccaccttggggtcgattggttgttgttttttcagccattagtcttcatccccctctctgatttgtgagttaataatttcttgatatgtggcgttattagccttcaattcagcatgtgagcctttaccgaccagctggccttcatccaagaccaagatggtgtcggcatcggcaacggttgatacccgttgaccaacaatcacaacgacactcttttgaatttcagcatcttcttttaaggctttccgtaataaggcatccgtcttaaagtccaacgctgagaaagaatcatcaaagacataaacagccgcttttttaaccaacgcccgtgcgatggcaagccgttgacgttgaccaccagagaagttgcccccaccttgttcaacgtgactatctaagccaccttcaagttcgctgacgaaatctttagattgtgcaatttcaagtgcgtgccagatttcatcatcggtcgcattcggattcccatattgcatattttcccgaatcgtcccggtaaataagttcgctttttgagggacaaatgcaacttgttggtgaatgtcatggagggtcacatctttcacgtttaaccctttgactgtcacttcacccgtttcaacatcgtaaaaacgaggaatcaagttgactaacgtggtcttccctgagccagtgcctccaatcacggcgactgtttggcccgctgtcatttggaaatcaacgttttcaagcgctaagtgttccgcattttgataacggaagttgacctggttgaaagccaagcttgctggttgatcaccaaacgttttaggcgtcgctggatcttcaatcggcgtgtgtaaatcaagcacttcattaatccgcactgctgaagcttgcgcccgcgggataaagacgaagaccattgaaagcatcatgaaactcatgaggatttgcatcgcataagtcacgaacgctaataaattcccgacttgcattgcttgattggcgattaagtgtccacccatccaagtaatcgcaatgttagtcccactcatgattaacgtcatggctgggaacatcactgacataatactataaactttcttcgcattttgcgtgtagtcagtattagcttcatcaaaacgttcttgttcgaacttgtcgcgccggaatgctcgaatgacccgaaccccggttaaaccttcccggaaaactaagttaatccggtctgtctttttctgcattgccttgaataatggcacagcgaagtacatcaccccaccaatgaagagtgccatgattggtaagacaaccaagaaaatggatgtaagttgcgcatctttttgatacgctaagaaacttgcgccaatcaacatgataggtgccataatcatcatccgtaagaacatcattgccacattttgaatctgcaccacatcattagtcgtccgcgtaattagtgaagacgtcccaacttgatccatttcatcgtgtgagaagttgatgaccttccggtagatatctgaacgtaatttttggcctaagccttgtgacgtccgtgccgcaagataaacgttgcagacggccgcgataatactaattaatgaaaaacctaacattttaaagcctgcttgccagatataatcaatattccccttagcaatcccgtcattgacaatgtcggaggttaaattgggtaaataaaggttactgacaacctgaatcgtcatgaataaaaccgcaccaaagacggcccaacctgacattcttttctttgcaagtttaagcatgttgtgtgtcccttctttccttatccttgtttgctggcccctgtttctaaccagcctaatactaattcgaagcgttcttggacctgttcaattgtaatcgcatggtcactttcttgttgcagataatacgctgcaatactttgaaagaccgtcgtcatcaactcatgaaataaaattctaagcgcttcgggttgatctgcgttaatcttgagcaagtcgtaattgacgttttcttctaaaaagcgcatcccatctacttgtttggcatgcattaattctggtgacatcttgcgctggttcttataatccatatgtaagaagaggtgcttgtaaaattgtgcattttcaccattaataatctcttctgccatttcagcaaagaattggcgaattgccttgaatagatcaccatgaacagccaacagactcttttctaaatcctgctttgaactgtcgcgtaataagctaaggtcgtagaaaaaaatatccgccttatcttcaaagtactgataaaaactgcctcgcggaatctccgccgttttaataatgttgctgacagatgcttcattaaacggtacccgtgaaaactcagcatgcgcagcttgaatcagtcgttgttgcttttcctcaggtaatctaaaaaatgttttcttcggcatttcgatactcctttctgaaaattaatgacagagcgtcataattgtgacgtaatgtcataatacgccaacttaggcactcatgcaagcattaaatccacaaaaaaagaaccggcaggctatcgtctgccggttccctttaaaaggtgctatttatcgtctttgtccattttttctttaatatcatccatcacgtcattggctttttcagcaactttgtctttggcatccgctaatttttctttagcttcacccataaagccctttgctttacctttggcctcagtttcgcgatcaccagtcaccttaccggctgtttcttgtactttaccggttacttggtctttcatgccatctaacttttctttatctgtcattcaaaatcactccttcttattggtctacctatatgataggatagctaaccaacattagtcaaaatttatgattatgagtcgcattatgtcagtttaccatcgcgcatcacgtattgatgatctgtataatccaagacgcgttcatcatgggaaaccatcacaatcgtctgtcctgtctctttcgtgattttagccagctgctcagcaacctgtaaggcccgtttactatctaaactagcggttggttcatccgcaaaaatcaaatttggctgaccatacaatgcccgagcaatcgcaactcgttgacgctgaccaccagataagctcgttgggtactgacgtcgttgatcccaaacacctaaattggttaatagttgttcagctgattgtggcgcttgcttttcacgtaatcgatcgactagttcgaattgttcttcaaccgttaaaaatggaaccagattcgaactttgtaatataaagccgaaatcgttaaaccgtaatgcagaccgctgtttttcgcttaattgactaatctcttgatctttaaaaaagagcttcccactcgttgggccttgtaaactacccataatcgttaataaggtcgtcttcccagaaccagatggtccggttaaaccaatgaactggcccttttcaatcgttaaatcgatttgatctaaagccgtggtttgctggtcgcctgcgccaaattttttgacgattttttctaaacgcattaaagccatcctatgcccctccaatcgcatcaagcggatcaatcttcagaatccgccaaattgagaataaagcgccaatgactgtcatcacaagtaaaacagcagaaaaggccccaattagtaaaggattatttgtatacggcaccgccgctggtaataccaatgttgtcaatgcgttacacaacaaaccaaggccaatcccaatcacccctaagaatacagattgccacattaaactaccaactaattggccacctgaaatcccttgtgctcgcataaccccgtatacggccgttttttcaatagtaataatatacatgaaaatcccaacgataaaggcgacgatgactagcaatgcgccaatcatcaaaccaaacgtcttaacctgtggcccataccccggaatcttatcgattaattctggaattgtcagtttggtcagctgatccgttgtcttaatccgcgcgtttccctttaatactaaagcattaatgcgcgtaatctgatcagtgccgtagcgcattcggctaaaatcggtcaaccgcaaataagtcaccggttgcgtattatagcggtggttcgtcgtaatcccaacaattttgtacttttgttgacgcccattcaatttaatttgttgatttaaagcaattccttgtaagccgtcgtcgaccacaatctcatttgcctttttaggataccgtcctttttgcaacttaggcttcaaaaaagcatcaaaatcgataccaaaaacactcgtattttgcttacttaaacctgaactactcacaacacccatcatctgagcaagttgcgcatgatttttctgtgcacctttaatagagggtaattgatcaacatctaattcagaagcagccaagtttttattcgcatactgactaataacaacttctttggcgtgccattgatcaattgccgaacggttattattggctagcccatatgccaaccccgttaaaaaatagattaaatatgcaattagaaaaatcgtaaaaatgatcaatgaataacgtaatttagcatgtttaatttctttaattgctaaatacatccaaacacccctttcttaactgttttaatctaacataaagcatcacgccttgaacagcaatccgcattcaatcttttattcattcacgggaatatgctatgataagcacacggaggtggcgcttatcaaacacgtcaaacatgggattgcctttttgcttctgattatcatccaacaagttcctttaatgattgtcagtggcttaacattgctccctaaggctcaacagacaacccatctaattttagtctttggttggctttttctaatcacgactatcggcattactgccctgatgtggtattactaccaaaaaattaaatcaacgcgttatgaccaacccttcaccaaacagacttggtggacaatgttgattggctttatcgcgatggttgctgtcaataacggtacgatcccgtttatgcatgctaccggtaatgccaatgttgatgcactaacctcagtctttcagacgattggtattttcatgctaccatacgccctattcttaggtccgattatggaggaattacttttcagagggttcctaatgaattggtttttcccaggcacaccaatcatctcaatcgggttaagtgctatcttattcggattgatgcacggcgcaactgatccgatttatttcatttcaaaagcactgcttggcctaattctggctatcgtctactatcgcacccataatattaagagtaatattgccttacacatgttgaataacattactgctggctttacgattttttaaacgactagaaaggaagcatgactatgtctgcattaacaaccatcttaacttacatccaagaacatcctgatgaagtggttctagaaccgtttcaatatgcgaacgtgattcgctttggcattagtgaccaagtcgatctgccagatgccgagaaactgttccctgatatgcggctacacgttaaccggattgaccccgagtacgtcaaagaacaccatgacttattgacgactttttatcaacaaaccgaagaaaaacaaaaagacggcttccaagatgtgtggattactaccgcccatcttagtgaccgtcaactttatttagtggatctttcttttgaataagcctcattttgaacagctaaaggtcagctgtattaagtatgctattttaaccttgtttctctttgtcatgcgtgcctttattgcgcatcccatcattctgattgccagttggattagcactgctgtttgcggcgcatatttcattgccatgttaattgtttattattacggctaacgttgcatatgtttggtctcagcaatcacttcttctgtaaaatacaattgaaaaccaaagaacaccgtcaacataatcgcagctatccatgcagtgcgcacattgattaacttaacaattaaccctgagctaatagtaccaatgaagaagctaccaacaattaacccgaagtaccgggctttttgttggtagtttttttctttggtcgctaaatatagataagtattttcgattaatttcttataattgccggtcgtaaaagcattcgcatatggatagccattaaccgttgaataactcgctaattgcatggccatcgacatcgacagaatcggtgtcacaaacatgttgggaatcgcggttgataaaaaaccaactactactaaagcaataatttgaaaccctaataaccacaaccgccaaacattcaacccaccagtgttaaaatgccgcttcgccagctgcacaataataaccccaaacccaaatgaaataatgggtaatatcttttcaggaagttgtgcccactggttcgttgcgatatctaagccgatgaacacgatattaccggtctgtgcactcgcaaagacgccaccacgtaaaatcacacaatacgcatctaagaagccaccaagaaacgttaaaaacatcgccgtgcttagccgatcatgaaaccctatttctttttgcaacccaatccctccaaatcaatactcttattatacgcaaattaaaattgaaatcaaaaaacggattgcactatttcacagtcgaaataaggtacaatccgctttacactataaattaattgaattgacatcttgaccatggaccacttttctaaagtcgaccagtcctaagtccaaaccgcgcagcaatacttcagccgtcccgacgttggttgccaacggtacttcataaacgtcagataatcgaattaatgcattcacatccggttcgtgaggttgagcagtcaatggatctctcaaaaagattaccaggtccatcttattttctgaaatcaacgcgccaatttgctgatcgccccctagaggacctgacttaaaccgtgtaatcggcaagccagttgcttcaataattttttgaccagtcgttccagtcgcaaataattcgtgttgcgccaaaataggtttataagccgtcgccagtttcacaatcgttggtttctgacgatcatgtgcaattaatgcaattttcatctgaatccctcctaatgtctgcggtgtttaaccaccgtaaaaaagtgtaacacacttgccaatagaatgaagaagattaaaacgaatgacacataattaagccaaaactggccaattggcaacactaagttcactaattgttgcagtaccatcgtaatcaaggttgcacaggcgaccatgccaaatagttgtatataccgtttcactgtatcatccgtcctctttgctttagattgaatgcttgcgccgacttggcgacattccgcttgtttctgcgctgaaagtgtctttaaaccatacgtttttgtctggacaacttcccggatttttaaaagtccagctgcccccaagactttatcaaaagttctaaaagtcccatcagtcacaccagtaaccaattcctcagctggactggcataacaactactaatcgtaatgtaacttttgcctttgaagcgatctggtaacgcatctcccgcccgattaaatcggactaaccgttgccgcacgcaatccaagaagtttttcatcacacccgacattgcaccccaataagttggcgcagccagtatccaaacatcggctgccaataacttagcttccagttcatccaataccggattggctttgccagcatctggtaatatttgataatcatttaaaaagatcacttcaacgtcatcttccggttttacacctgctaaaacggcatctaaaagttgcccattgaccccatctcgttgatgactgcctaacactcctaaaatcttcatctgatcaagcctcactctttatactactttcagtttacacttccaatcactaacttaccataaaaaaacgcccagaccaatggcctagacattgtcattattttagtttagtaccaaccattacttaaccagaagctcttagcggcatcccatgaaccataacgacttgttacatattgatctgcaacgcggtcttggttagctgctgaataatcaccatttaagtatgaagctgataattgataacggccgattaattgaccgttacgtgctgaatatgaaccgcctgattctttttgtgcaatccattccttagatgaactcgttgtagttgttatttgtgcagctacaggtgtttgttgtactggtgcagcttgaactgcaggttgtgcttgaactacaggggctggtgtttgaacaggtgcagctacttgttgagttacaacaggggctggtgtttgtgccacttgatcagcatcaattgttaattgttcaccaacaaagatcatattaatatcagcgatattattagttgttgcgatttggttaacaagctcggtactaccattgaatttttgcgcaatggttgaaagcgtatcaccatttgcaacggtataagttgttgcggcactggcttgtgattggttaacgaaaagtaacccggttgttgcgactgttgttaaagcggcactgtaaagtaaagtttttaaagatttcatattttgaatggactccttattgtttaaattgatttttctatctgtttaacgtgggactaatataccatcttaaatccgttagtaaatatcaaaaccataacaattgatgacaaatccgtaacaaaatgacggcaatttcacctaactttgtaatgaagcccacaatttaattgacctgtaatcgacctaaaagctaataacaccaaggattacagtcaataaaaatgctaaatatgctattttgaattaattaaccctctttcaaaaataaccgccctatttaacgtaataataagacgaggtgatcaaaatgaaagttttaaaattaaatgatttagatttaaacgtcgcattggatgatcgaatgattcaaatttctggtgctcaggacacaacattaattttcaaaagtaagctattagcacactattggttcttcaatttacgggctttagctaagattgcggatcgctatgcgatccaaatcatgtttgagacagagaactacaaataatctgccctatcgatatgaagccacaaaaaaagagctgattactcagctctttctatcttaattgggtatatagggctcgaacctataaattccggattcagagtccggtgccttaccaatttggcgaatacccaatatcatcaacgaatactatgatactgcacactccagacgttgtcaattatgatttttaacaaatctttaaaagaggactatactattcttggaggtggttccaatgatgaaaaaagcagaaatcgaaaaattatttgacgggaaagttgccgtatatgatcaagaccacgttgtgattgattggatagattcacgcaggacgcttgaagtcacaattgataacgatattctaaatctactgataaaccatcaggactatattcggaatatcttgaaacatttaaagagacaaacaaatcgcactatgaccaaggaaattattaacattaatcgtcgtaactataaaatcttcatttagcctcgctagagtcaattaaccattgacattacaggctttattcgctaagatattagttgttccgaacattgcccgttggtcaaatcggttaagacgtcgccctctcaaggcggagttacgggttcgatccccgtacgggtgatatttaaaacagcctagaacccagaaaagccgttaaactaaggtttagcggcttttttgtttgtttaaaacgtgtaaaaaagctagcctcctgacgctttagttagggggctagtttttttattgcgtagatttcttctattaaaatggcttcatttgccacaattatttggctaccaaaccagccactgattaaaccttccaccttactgggtacaataccttctattgaacgttctgctttgtcgatttgaaccggataacatttaacaattgcgtcattgatggtattagcaatcatctcagcagtcatcgcctcaatgtgtttttcattgcgcttacgatcttgtacgcggttattcttatctaacactgccgtatgatcgcttaaatagaacccttgccatttcatcatgccacgatcataataatcatacttcaaaaattgattaaccaaattgggatcatattcatcattattcataggcgttccctccagcatgcccaccgactaagccagcacgctcaattgcagtcgcaccttttactttgctagacaatttgaccactgatgtaaaaccgtagcgcttgcgaatttcatcgaccgtgctatctaatttctgctttttcaaattaataaactgtgtgtcgaacatatctaattgttccgcactatcgtcaaccaaattgctgcacgcaatactaatatgccgaatcgattcgtgttgccattcttcacgaaaaagttggatggcatgttttgtgagttgctgattagcattagtcgcatcaatcttcattgaacgcccaaaaccaccacgcgatgcatcctcttttgcagcaaatgaaaagccaatccccagactgataaccgtggtcgccttgtgatgcgccctgagacgtgcagccacttgctctgcaatttcccgaatcacaacttcaatctcagcttggataaaataatcgcgtggtaatacctgactattcccataagacttctctttggccttatatttatgccgtacaacggcccgatcaatcccccaactaaacgcaaacaactgcgcgcccatgacacccatttcttgttttaaccgatagggatttgtatgcgcaatatcgtacatcgaatgaatgtgtttctgattcagtttctctgccgtacgatgcccaattgaccagacatcatctaactgggtcactggccacagtttatctgggacatcttcataatgccattctgcaatcaaactgtgattccgtttggcctcaagatccaatgcgagcttggcaagtagcggattatcgccaatccccaccgttaaataaatgcccgtttctttttttacagccagctgaattttacgtgcgacttcgtacggcgtcgctccaaagagttgccaactatccgtgacatcaagtaacgattcatcaatggaatacggttgaatatcttcttctgccgtaaattgctgaaaaatacggttaatcttctggttcacttggatgtacaaattcatcttgggtggctcaatgattaaccgcttatcatgaattggaacatcccgggcacgcgttacgttactgataccaaataatttcttagccatgggactggctgccaatactaaaccactgcccgtgtttttctctgtggacatcaccaccaaaatagcctttaacggattcagtttcaaccgaacggcctctactgatgcgtaaaaagatttcgaatcaatcattaaaatcacgcggcgtagttcattctgatagtcatacacgactcttcaccccaacttgaatctgacgcacttgttcatctaattcgcgttgccaccgattaatctcaatcaaggtgacggctgatagatgacgataaataaattgcggaaacttatcgcggttgtagtaataattcattgagtcaatcaaatcatcactatgattcaccgctaatcgccgcaattctaaaactccaaagccatttaaatataaactcaatcctgtttgatctagcgtaatcacttctttattcgtatgcatcaggcacacctctttaattcatcttatgtcctcttaattatacgaacatacattcgatttagtcaagtgtgatttctcagagaataaaaaacgctcaatcaaattaaatttgattgagcgttaaaggaaccttaaattttaataccaaccgttacttaaccagaaactcttagcggcatcccatgaaccgtaacgacttgttacgtattgatctgcgacgcggtcttgattggctgctgaatagtcaccatttaaatatgatgcggttaattgataacggccaatcatttgaccgttacgcgctgagtatgaaccaccagattctttttgcgcaatccattctttcgctgaactagttgtcggtgcaacagcagctgtttgttgaactggtgtagcttgcactgtaggttgtgcttgaacaactggtgctggtgtttgaacagcggctggttgtgcaacaactactggcgttgtcgtttgaacaggggttgctgtttggtcagtgtcgattgttaattgttccccgacaaaaatcatgttgatatcttgaatgttgtttgttgtggcaatttgattgactaaatctgtgttaccggcaaatttttgggcgattgttgataacgtatccccagttgcaacggtataagtagtagcggcacttgcttttgattgaccaacgaaaagtaatcctgctgttgcagccgttgtcaatgtagcgctaagcaataatgtcttaaaagatttcatgtaatagatgtgctccttgttgttttgatttattaacgtgggactaatataccatcttatattcgcttgtacatgtcaaaaccataacaattgatgacaaacaggtaacaaaatgacggcaattcccgcgctaattgtaatgcacaccgcttacttgactgctattacacaaataacgcctaggacaatcttctgtcctaggcgttataaactaatttattgatgttattcacgacgttttaaatgatacttagagaccgatttttggcggccaagaactagcggaatacgttccacgaacacatcactatagtccaatccaaaccatgaagccggtgtatcagtgaatttttctaaccataaacgcatttgaacaatccctttatccattgctcgaatttgagttgctggtgataaatcttcttgcatgatcacaaacgagaaatcgccaacgttccgatttggaattgttgtgtagcgttgtggttgtgctggtaattctccccgatgaatcatttcttgaatgatttgacgaataaagatgttcactttttgttccatcttaaagcctagatacaactgaacgttgacaatgtagtccgtcccaagcgtatctgcggtatattctgccgtatacggttcatcagtaacattgaccgcaacaaaccagtaaacttgcgcccgttttggtcgtttatccaaaatagaataaagaatattcttcttaaccatattcttttcatatggtttattctgtggttttgaaagataaaccaaattagtcgtatacatagctaacgctgtatcgtctcgcaaatcatgtagttgttgtttataagctagtaatgaaaccgtacttgccttgaaagtattactttccttaatcgtattactacgataccaaacaaacatgatcgatagaataaacgccgcaattaagactgtcacgtaaccaccatgcatgaatttagcggcacttgagatgaagaaaataacttcaattgtcccgaagaagatgagtaccaaataagccaatacccatttcttctcgcggcgtcccaagtaatggaatagcaagatagttgtcattaacattgtaatcgtaatcgccaaaccgtaggcagcttccatgtgcgctgagttcttaaaatagaaaacaaccattaaacaaaccgcccatagaatccagttaacgattgaaatatagagttgcccttttaacttagccggataatcgaccttaattcgtggtaagaggcgcaacttgattgcttctgatactaaggtatatgaccctgaaattaaggcttgtgatgcaataatcgccgcaattgtagccagtaaaatcgctgggacctttaattgggctggcatcacttcaaagaatggattgaaatcagaaatatgttgatatgccgcaatatctttatgttgtaataaccaaacaccttgtccaaagtaattcaacactaaacaaagcgcaatgtatggccaactaccatagatattcaaccgcccaacgtgccccatatccgaataaagtgcttcagcccccgtagttgccaagaaaacactgcctaaaattagaatccccaccttattctcagggctaaacagtagttcaatcgcataatacggattgagtgccttgagcatcgttagatcccccattaagttaaccaaaccaatgccaccaataaaggtaaaccaaattaacataatgggaccaaaagatttaccgattagatcagtcccaaatttctgaatgaaaaataagaccgataagatcgagaccgtcaataaaatcacctgatcttgattattaattaaaacgttcccattaattggcaaaccctttaacccttcaatcgccgtcgtgactgtcacagcaggtgttaacatcccatccgctaataacgtcgccccaccaataatcgcgggaatcacgagccacttagcttgcttacgaatcaaagtgtacagtgcaaaaatcccaccttcaccattattatccgcacgcaatgcaatcatgacgtacttgacggtcgtcatcaacattaacgtccaaaagacaagcgaaatactgccgatgataaaatcgcggctgatgtttgccaaaccgccattcccctcaacaattgatttcataacatataatggcgacgttccaatatcaccgtaaacgacgcccatcgtaatcaaaatccctgcaactgataatttatgtccagttgtttgtttagttgtctttaatttcatgatttgttacttccttatactccaatatagcattatcgtagcttgttccagattgaaagtccagtcttatcatcaataattatcaatccactgtattccatgctataatagggacactgaaacaagcgagggatacaaatgaaagataaacgtcaatttgaaattgctaagaagcaatacaagaaactagcgaaccgaccactatcaaaggaacgtaagaaagctgttagtaccgcttcaacttacatgttcacaatcttagttgtggcctttattctattggttatttacttgttcgttcactaaaactgcgtaagcagtttttttttacgtatttttttgcagaacatatattgaatattatttttcgtacgtatataattaaataaatagctttttaagcttaaattactacaaaaaacgcgaacattatcgagaaaggcggctctcatgccctcaaaaaaacaagtttatctcgctggcccattttttagccccgaacaaaacgatcggttagatcaagtggctgatttactcattaaaaacccaacgattgatgctgattcacttttcaaaccaggccaacacccttatcctgatgcagaattcggtactttcgaatggcaagtcgctacttttaatgttgatacgcgtcaaattgaccaagcagatgtcgtagtcgctgttatggattttaaatctgaagaaggcgaattcgaacctgattccggtaccatgtgggaatgtggttatgcttttgcccacaataaaccagtgattctcgctcgttttcgtgataatttaccaattaacctgatgttggctggttctgcaacggccatcttcaatggtgaagcggatattgaaaacttagcgacttatgatttctttgaattacacaataaatatgttcaaacagatatcttttaactcaaaaaagaaccgactgatgcgtcggttctttttttttggcctaaaagccgttattctcgctcaattcacggtaccatcgaccgctcttcttcatcgtgcgctttgcctcatggtccaaatcaacacagtagaaaccataacgattccgataaccatttaaccaagaccaacaatcattgaaggtccaagtatgatatccaaaacaactgctgccggcttcaattgcacgatgtagttgcgtcagatgttcttgcataaattcaatccgatagtcatcttgaatttgcccatcttcacccataaagcgttcttcatcggcaacacccattccgttttcagaaacataccacggaatgttgtgataatcatttttcatcatcattgccacatcgtacaatgcttctggataaatctcccatccacgatatggattaatcttccgttctggccaaatataattagcatataagtcttccggtgtttgtgctgggaacttcggattctctggtgcttgaacccgcattggttgatagtagttcacgccgataaaatcgacacaatgatcggcaatcaattgccggtcgccttttttcgtcattggtaataactcatgttttgttaagaggttaattaattcttctggaataacgcccaaaacagttgggtctagaaaactcttagcgagtagtaagtcagcattttgtttagccattaaatcctctggtgcatcactcttagcgtaagctggcgtgatatttaaaataatgccgatctgaccatccggcttcacttttctaaattcagcaacagctgctgtatgcgccatcaaggtatggtagccaacctgaacagccttcttgaagtcaacaatgtctggataatgatagcccgttaagtaaccacattcgatatgcacgataggctcattaaaagtcgtccagcgatcaaccaagtcaccaaacaattcaaacgcagtttttgcgtagaatgcaaaggcatcaactgattcgcgtgtctcccaaccgcccttttccattagccaccaaggcatatcgaaatggaacagattaatgatcggtgtaatgtccacatcacgtaagcgcttaaaataatcccgataaaaatcaaccgctacttgattaacatgtttgctatcgggcattaatcgtgtccaagcaatcgatgtccgaaatgagttcaaaccaatcttttgcatattttcaacgtcttcacgatacaaccgataagtatcactagccgtgtcaggcccttgatcgctattaaacttatcaggttgcatctcaaaccatttgtcccaggttgatggggacttaccataacttagggagtatccttctgattgaggtgcggatgttgctgctccccacataaaatgctctggaaatttaatcataaacgctactctccttaaatgtaatcgccaacattttatattgtaccatttctctaaagtggtcgcacacctttctcagtcgattatttaatatgcgtacctccgaaatattatacacgttaaataaattgcagactgagattaataatatgcattattataaaataatttatttttttagggttttacacgtaaaagggttgtaaattcccgttattttatgatatattcaataacagaaatgattaatactcccccaagtaagatcatttcaatattcagaagatactcggtataggcctttcccaattaaggtttatgccgggtattttttgctttgaaagcaaaaaaaatagtcctgacggactatttttagaagcggtttgttatgcaaaaatcatttggaaaatacctgcgccacagatggcaccgataattggtgcaacaactggcacccaagcgtaactccattgtgagtcgcctttgttcttaagcggtgtgaacatatgcaccaaacgtgggcctaaatcacgagcaggatttaaagctggtcctgttgggccacctaatgaagcaactaatgtcatcaccaataaaccaacaacaatatggccggcagcgccaaacttacctgcaccaattgctaaagcaccgaaaactaagatcaatgtgcctaaaaattcatttacaaaaccattcatccggctatgagcagcatcgattgttacgaatgagcccaagattccttcttggtttgttgtgcgatcataatatggtttgtaagcagcaaccaataataattgaccaaccattgcacccaagaattgaacaatgatgtatggtaaaacattttcccaagggaataagcccatcactgcaaaacttaatgtaacagctggattaagatggttaccggaaatgctcccaaacataacggcaggaatcataaccccacaaccatatccaaaagcgattaaaaaccaatcactactaaaaccttttgttccttttaattcaacgttggctactgccccgttaccaaaaataatcataattgcagttccaataaattcggcagccaaacgggttgtcaaagaagcgtccactactattcctcctataaatgattcatatttttacgtatcatattataatacgggaaaatgcaaggaaaaacaattgacttttctgtttaaatccctttcatgagaagattcatatttttacagacctttctgtaaatttgacttgctaatatctcataaaatgggataatattcattgattaaccatattaaccctgattatccgattactgttttggaggttactatatgaacttaatactcgccatcgttctttatgcaggccttgctgtctttgcatttggcattatcctgctcctatttttcttaatttttaaaaaacggcttaaagcccctctaattatttgcttgattggtttgattatcgcggcatctcctgttggctataacttctacatggctcagaaagaacaccgcgaagaactagcgaagattgaaaagaaagataaaaaattcgataaagctgaacgccaattcatcaaacatattaaaaaatcgactgttgccactgaattcatcgctcaaaagtataataaagtttggggcgagttaacagaaaacggaacagttaacgtcgcaaatgttgattataacgatcatgatagtgctgttgctgctgaaggtcggcgtttactagcacaaggaaaactcgatgacgctgatgattactatgtcagtgctcaaggtgactaccaaaaaatgaaagactacgcgactgataacaatcgccaagaactcgtttacgccaaagatgtcttatccaagactgggtcgttcgtctctgttgcaacccgtccaaacggaactttccaagaatacactgatgatgtttacaaggctaatcaacgacatgtccgcgcaattcagaagttgaaattttcttacagtagtattaaatagtgaatatggtgattttgaaaaaaagatgaaatgggttacaatgaagtagaagactggggagtcttttattttttgattcatagttaaccctattatcgatttggagtgtgagaaatgcgtcacgtcaaattattattcatgattttaggtctaacttttattttaaccgcttgtgggaatcctgttaaagcaaagctccacgaaacaaacagtggcttcaatgcgcaaatcactggtaagactaagcataaaaaggtttattggcaaatcggtgataccattcatacgactaaaacaaccgatgatgctttcgcattcgaagtcccttacaaagctaagcagtaccggattacacttgctgataatgaagaaatgcgtaatccaacttatgttgaaggccctgtcgcaaaagaaattgtgcaatggccgaactttattcagatttataatccgattgcccaacaaaaaggactgggcgttttcgaagcgaatccacttgaaggcattcgcactgatcaagttgacagcaacaacgtgattgccatgaacgtcagtgatagcaaagtactggggatctcaattaaagctctcaacgcaggtaagaatctaacgtttaaaaactacgtcctcgccttttcaacaagtatcggaaccaaaccaacccagattactgaattggtcgaccgctcacttaagaaatctgggtcattaatgcaactgacggatcgcgaagttcgctataccgttatgacgaccaataacaacaagcaacaagtcacacaactttcaattaatcatttataaaaagaaagccgccgaatctacgattcgacggctctttttttatatagtggttaaaaaatttcgggagaaattattcacattcttgttatagggcgcagttcaatcaaagtaaacgatacggtcggcacaaattagtggtgccaaattgttatagtcactcaaccagctatcccctatcgaatttaaagtgcttatttacggcgtttcttcgtttaaaatgctatactgaaggtaaataaaggaggccttttttatgtttaattatcagcatattcttatcggtttagatggttctgagttatcagaacgcgctttcagtgaggcgattgaaattgctaaacgcaataatgccgaattagttgtggctcaaattattccagataccctttacacaaatgcacgcatgacttaccctgctgaaacaacgacatctgaaaaacatttcgttcaatcgtatcttgatcaaaaggtgcaattcgctaaagaacacggtgtccctaacgtacgagccatccttaaagtgggttcgccacgtcgtgaattagcctttaccatcccagaagaagctcatattgatttaacagttctcggtgtcagtggtaagggcgcctttgagcggctcttaatcggttctgttgcacaattcatcagtattcattctaacaccaacgtcttattaattaagccttaagccggtttaaagattggttaagtttaatgctttgtttttgacgtgtcccatttctaatatataataaaggtagtttaggagtggttcgaaatgccgtttgatatcactaaattgtctgatcaaaatattaagcgctggttcttacaacatcaccaagcaatcgttgcaacccttttgcacccaaacacttggtgggcaagttttaatcgccaattaatgcgctttttccaataatcactaaaagtgacgactgaatttgccgtggtcactttttttaatgacgtttttttaaaggagttctgatcgatgaccgagcaaacttatacttttacagcctcaatccaagccgcgacgattggtaaaggcggtgcatatgtctaatttcctggcgatatccgcgcaatcttcgggaagggtcgtgtaaaagtccacgcccttttcgaccaacaaattccctatgatggcagtattgtcaatatgggacttaaaaatccagatggcaacatttgttacattcttggggtccgcaaagacatccgtgcacaactcaaaaaagaaattggcgattccatcacagttgaaatccgtgagcggctatagctattacgcccctttaaatgctatactattttaaatatttatttcgtcgactaaatttagaatgaggattatcaaatgccaaaacacctttacaagcgcgtggcagtcgttttaatactgattaccaccctttttttatggcttttcacaggaccggccagaagtgaggccgggatttggttcttccataaaaccacaccccaaaaaattgttaagaaaaaaacacccaaaaaaattgttaagaaaaaaacatccaaaaaaatgatgctcgatatcacacctatttcacaatttcctgaattaccaaccggttgtgaaattacggctgttgccatgcttttagattaccgtggcgttggcatgagcaaaacagaagtggccgatagtatcccctatgtcaatgatggcgatatggaggtcggcttttgggggaatccatacgatgatactggctacactatgtatcctcctgcttggacaggattcttctatcaatatctcggcagtttcaccgatttatcggacgaaccgattagcacgctcaaagccactttaaaacaaaagaaaccaattgtcgcttggattaactaccataaacaaccagcgcattccgtcttattaattggctatgatcaaaattcatttacctttaacgatccatataccggcaaacgaaaaaaaatctcatttgataaattctggaaaattgctgcgccacagggacaccgtgcaatgacttattaatcattaacttgggggatttaacatgcataaacgaaccattgcagtcacgttcattactttaagtagtctttcattagctagttgtcggtcaattaaacctgatcaacaagccgtaacccactctgaaagtttagcacgctatcgcgcctcatcagaagcaaaagaaagcaatcagcgtcgatcaatcgctagctcgaaagaagcttctattaaacaacaatcagaaagtatcgttgcagcttcagaatctattgaacaagcaaaacaacaatctaatcagtcaacaagtaccaaaaaagcgctcactgccgaccaacaaacttctgttaatcaagcttttctagcgtgggcggctgggcgcgccacaattggaaacatggccgtcagtgattggtattttgaccacggtgctgccggatttggcgattggtttgccaattcacctgatggccgtattttagttcaacctgggacagcaagcccagggtttaatgcctaccctgttcatgcaattggtggctgtgtcttttacaccgctttggatggaacagtcggtaaagataatttagattgtggatcattcgccgataactacagccttaacatggcaatggacaaaccggttagcaaatacctactcggtgataacggcgtcgtgtatgaacttaatttaggtaatggtcacctcacatcaactaatgatggtttcagcgaactaaaagatgacggcaaacaagcttactcagaaccacttgcctttgccgtttctgaagacactgctgcccaagctgaactaaaatctttacttgcttaactattagagtttaaaggagcacgactatgaacaatgccgaactacaggcctaccttgaagaacattcccgcgtcatcaatacatttcgagccaaaggtttagactaccaaaatgaaaagaaccaaaaacgccaacctgccagacgttggaacgagaatagggtcaatcgggccgttgataaaatggtcgccgaatttatcgctagtattcaagtgaaaatggcattcaacattcgtggtgaacatgccaaagaatatcaaacttggttaacgttcattgaacaaaatgaagttgtcgaaggcttggaagaatcggttaatgaaatggcgtttgaataataaaaaaaggcctccccgactaagtgaagcttagctagggaggccttttgaatattagaaaaagtagtttcttttaacgaataattttccgcaaagtaattgcactggataatattaaggacgttgaattgttaattatccttgtgattttcttatcaatattatatgatttacttacgaaaggtggttttaaattatggttaagttattctttaacgacggctcaaaaattgcgctccaacaaaatgacacattatctgcctttggttctacgaatggtttacgccataagttgaccatcaaagactgtgctgctgcagatatcgtcgcaaaaatctcgcactttgttaaggacacgccggcttttatcctcggaaatagtcctagcgaaacttatcacagctcaaatctcattatgattactacacgttaattaaaagactgccgttgggtggtcttttttattttataactcaaaaacgccgctctcttgagcgacgtttttctttcagattaactttattgatttaaataattatataagccgcgcatggtcgcatccgccaacgttaattgctgcccatccaatgtcacctgcttaattgcgacataatcttcgaaatcgggtacttccagttgttgatttgcgacaaattcagccgctttttgataaaccttttcagcgttcgtttgaccgttgacatattgaatgactaacattgccatcatctccacttttacttttaatatcattgatgaattggtcatctttgataaggtcattatacttcgcttactaaaaataagcaatttatatattttattctttacccgtattaaacaaaaagcatttaatccatttattttagaacaatgcaccaaatactgcaccatttcataaaatcaatagactaaatgctttaataaaagtcgaattttatctttataaacgttgaattatagacgttcgtttaattctttgcctaattcttcaaagccaggtttgccaagtaatgcaaacatgttcttcttgtaagcttcaacacctggttggttgaatgggttgataccgttcaagtaacctgagattgagacagccatttcgaagaagtagatcatgtagcctaatgtgtaggctgtttgatctgggatgttaactgacataacagggacgccaccatcagtatgtgctaaaacaacaccttggtaagctttcttgttaacgaagtccattgtgtggccttctaagtagcctaaaccgtccaagttcttttcgtcagttggaatatcaatgtcgctgttagggttcacaacgttgacaactgtttccatcaagttacgacgaccttcttggatgtattgacccaatgaatgcaagtcagttgagaagttagcacttgaagggtaaatacctttttggtctttaccttcagattcgcccatcaattgcttccaccattctgagaagtattgcaatgttggttcgtagttttctaataattcagttgtgtaacctttgcgataaagaatgttacgtaaagcagcatacttgtatgcatcgtttttcataacatctgtatctgtgtattcagtgcgggcatcagctgcacctttcatcaattggtcgatatccccaccagcaacggcgattggtaataaaccaacggctgttaatactgagaaacggccaccgatgtcatcaggcacaacgaattcttcgtagccttctgcatctgattctgtcttcaaagcgcctttagcacggtcagttgttgcatagatccggcctttagcttcttctttaccatatttcttgatcaacttgtctttcaaaacacggaaagcaattgaaggttcagttgttgttcctgattttgagataacgttgattgagaaatcgcgatcgccgatcaagttaactaagtcgtttaagtaacttgaactaattgagttcccggcgaataatacttgtgggaagtcacgttgttctgctggtaacatgttgtagaacgtgttgttcaagaaatcaattgcagctttggcgccgaggtatgaaccaccgataccaattgcgatgaaaatttctgaatcgctcttaattttagcagcagctttcttaatgcgggcgaattcgtccttatcgtagttcactggtaaatctaagaaaccacggaagtcgttgcctgcaccagtgccttcacgtaattgtgagtctgcagcattaaccattgcttgcatttctgcaagttcgtttgattgaacaaatttgtccaaacgggatgcatcaaatgaaatatgtgccatattagtcttattcctcctgtttttaaacacaagtatacgttaataactttagcttttttagcgctaaaaagcaagccagattaaccgctttttcagcctagaccacctttattttcaaaagaaatttactcaaagtccttgacttgtttcgcccatcccgctatacttcgtatcatcaaataaaacggaggttactgaaaatgacaaacactcacttagtacaattgaatattcgttggcaaagccgctaagtgaggttgtatgccgttgtggatgcaatcttttgattgtatccatgcggccattcatcagtaatcgattgaattttaagcctacatggattttactcgaggaaatccatgtaggctttttctgtcccctacatgactgtcatgtgggggacttttttgtttgataaaatgagtgcgttcaaaccgggtatatttcgaacactagcctagtggtgcgaatgaacgacgcagtcggtcgtttgtgcgtcgtagctaggcacaggaatacggtttgaaaagcacgttaaaggagctttcgccatgtctaaactcaaacgttttttacccctcattctaatttttgggagtttgctcaccctacttggtatcaaaaaaatcaaagaagccaaccaacctaaattgccaattgtcgggattttacaacccttatctcatcccgcacttgatgaaattcatcgcgggattgtcgctggtctagcaagcgaaggctatcataacaaccgtaatatcaaaattgattttcaaaatgcgcagaacgatcaaagtaatttacgtctgatgagcaatcaattcgtcactgaaaaagccaaagtaacggtcggcattgccacccctgccgcacaaagcttagccaatgccactaagcaattaccgattatcttaggcgccgtgactgatccggcgagtgccaatctcgttaagaacaacgcccatcctggtgccaatatcaccggcgtatccgatcaagccccgattcaaaagcaattggcattaatgcaaaccatcatgccgcaactgaaaaccgtcggcattctctattcaagcagtgataactctgccaccagtcaaatgcacttattcaaacaacttgctgaacaaaaagggctgaccgttgttgaggccagtcttagttcagtcaacgatctggaacaagtcagccagaatctagtcccaaaagtcgatgcaatttacgttcccaccgataatacgattgctagtgcaatgggcaccctcgtccatgtgaccgacaaaaccaaaacgccagtctttccatccgctgaaacgatggttaaagatggcgggctcgcaaccgtcggcctaagccaatacgacttaggcgttgaaaccggtaagatgaccgccgccgttttaagtggtcgttcaaaacccgcaaccactccaattcggtatttacgcaaaggacatttagtcttaaacctcaaaaaagcaaaagccctccacatcacaattccgcagagtttaatgcaaatcgctaatcaaaaaggagctgttctcaaatgaatcttattatctcaaccattgaccaaggattattatggagcctactaagcctaggcgttttcatcacctttcgaatcttaaaattccctgacatgaccgttgaaggcagtttcccgttaggcgcagccctcagcgctttaatgttgcaacaacataacattgccttttccctattagtcgcattcatcggtggctgtttagccggactcgtgacggcaattttatacaactacttccatgtccagagtttgttagccgggattttaacgctaaccggtttgtattccatcaacttgcggattttaggccaagccaacatggcaattggtgatcaacacaacctatatcaactgccgctattccatcaattaacgctcgatcaacggctcttagtcattaacctagtcatcatgctgatcgccctattattactggctggcttactctacaccgaattcggtcaatccctgattgcagctggtgataatcccacgatggccctctcacaagggattgccgtaaagcggacgaaaacgattgggatcgtgctgtcaaacggcttgattgcccttgcaggtgggctcgttgcacaatataacggctttgctgatgtcaacatgggcatcggtgtgatggtcattgggttatccgcgatcatcattggtgaacggctccttgtcggcaagcatttcatcgccaaactaattagcattatcctaggaagcgtcgtctaccgcctcatcttactccttgtcttacaactcggctttaacgccaatgatttcaaactcttctcggccgtcattttggccatcttcatcatcgcaccacaacaaaagaaaggactgactaccaaatgaccccgcgtatgactttaaaccacctcaattttgaagttactgataataatgaacctaaacaactcttaaatgatttaaatctcacgattaatcctggtgaatttgtcgtcctccttggcgcaaacggtgcgggtaaatcgactttttttaataccattgcgggtgatttaacccccacaagtgggcaactactattcaacgaccacgacattacgaagcaatccgcccaacaacgcacacggctcattagtcgtgtctaccaagatcctaagttgggcaccgcagctgatatgaccgttgccgaaaatattttgttggcgatgcgccgtggccaacgccgccgcttatttccccggcgtctcaagcaacaactcccacaaatcaaagcgctcgccaagacactcccgaatcacttggatcaacaactcaatcgcccggttagtaacttgtcgggtggccaacgacaaacgttaaacttcttgatggcgacgattcaaaaacctgaattgctgttattagatgaacacacatctgctttagatgcagtttccagccaagcattgatgacttttaccaatcaaacaattcgcgataaccaactcacctgcctaatgattacgcatgatttagaggatgcgttgcaatatggcaatcgactcttggtgttaaaagccggtaaactgattgccgacttgaacgcgactgaaaagcaagcattaactgtcgatactttactagactatttaaactaatcaaaccgcgctaaccattttcggatagcgcggtttttgctgcttaaatccattcaatcttatcaagcaccaatttatcagcggttaattaattaaggatatgattaacctacgtttaacacttgtaatcgttttctaagtatgctaaattattcccataaggttgtgcgcaacctaattattgatttaagggagatctgtataatgacagttactactcaaaaaactattccagctagtgttgctatgcttagagttatcgaatcttggggcgttgatcatatctttggttaccctggtggctcatttaactcaacaatgaatgctcttaatattgaaaaggatcgtttaaaatatattcaaattcgtcacgaacaagttggggcccttgccgcagctgctgacgctaaattaactggtaaaatcggggttgcttttggttcagctggccctggtgcaactaaccttttaactggtttatatgatgcaaaagaagatcatgcaccagttttagccttgattggtcaagtaccaagcaagaacatgaactacaactacttccaagaattcgctgaaaacccaatgttctctgacgttgctgtttataaccgcctcgttatgacacctgaaagcttgccatacgttgttgataaagcaatccgtgaagcttacaaacacaatggcgtcgcagtggttgttattccaaatgacttcggctacgttgaaattccagatacaccatatagctcaagctcaccttcagatcgtaaaaaagtggctggtccagtcgcaacagacgaagaagttgatcaattcttagcaatggttaaagacgctaaacgccctgtaattcacgttggtcgtgggattaaagacggcggcgacaagctcgttgaattatcaaagaaacttcaaattccaatcgtcatgactgggcttgctaaagggttagtgcctgatagttatgaaggtaacttaggcatggctaaccgggctgcttctaaagcggctgatgaaatcatggccgttagtgatcttgtgattgccatcggtgctgacttcccatttgccaacttaatttatcggacacatgacttcaagtttatccaaatcgataacgatgaagcacaatttggccgtcaccatttcttagacttcggaatctggtcagatgcaactgcttttgttgaaaaagtaatcgccagaagcgaaacggttgccccaacaccattcttcaaagctgctgttgctgatatggcaaactggcaagcctaccttgatgttttaacgaaccgcgactctgatccgcttgaattcgaaccaatctacaaagaaatcaaccggattgctgaagacgatgctgtcttttcaatcgatgttggtgataatatcatcaacagtttccgtcacttgaacttaacgcctaagaacaaatgggtgatttctgccctctttgcttcaatgggttcaggcgttcctggtgccttagctggtcaattgagctacccagatcgccaagtcttcaacatctcgggtgatggtgccttttcaatggtcatgcaagacttgatcactgaaaagaaataccaattaccaatcattaatatcatcacatcaaatgccgcattaaacttcatcaagagtgaacaagatgatattccaatggattactcaggaatcttcattgaagatcaagattttgccatgattgcgcaagcaatgggcattgaatcaatcactgttcgttcttctaaagaattacccgctgcctttgacaaagcccttgaagtcacaaaagctggccgaccattcttaattgatgctaagatcactgacaaacggagtattccagttgaagaattagaactaactattaaagatggtaagataacagaaacaattagcgcaagctatgatgcttctcgtcctgctggcaaagaatacagcgtggctgatttcttcgcagaatacgatggtcaatcactgaagacattaccagaattatttgaagaaaacggtgttgaactataaaacaacccggccatcataaaaatagcgtctcaacacattgcggtgtgatgggacgctatttttattgatttaatttttggtaatggcttctttaggatggaaccaaacgacgttcttgtcgaagaatgagactaagtcgtttgataagtacaagatataggtgaagaataagacccaatttgagccaccctgcattgctgtaatgccccacaacgtgattgatacgatactttggatgaaccagaagtaatagctttctttaaaccgtaatgtggtcaacagtgcgccagtaaacccaactgaagtggcgatactatcgatcaatggtcgtggactgtccgtcatattactttcccagagatataataacccgactgatatagcaaagaacaatagcgtcaacgcccaattacgaagtcctttaccacgagtagcaagcccccggacttttttatcaacgttttgcgcccaatctggcattaataagactgggatgtctaacataataatgtagacggtttgtaataacatatcgttatagtttttagcattataagccacaataatgtagattaatgcagagatgacaccaaagacaccgtttaaaggtttcgtattcgtaatactaatagtacaggtgaagcctaacatccccgcgagcatcgttaaaaacgacacgccagtcattggaccaccggaaatagtagcagctaaaataaagcctaacccaaacatcaacaaaccataactggatgttgtccaccctttcatctgttgaatgtaccacttaggattaaatacactggtgattgcacgattgtcttgcattgaactgaaaccctctttatatgaatttagttatcactccagattgtcaacaccattttccatatattgatgtaccatctgacgaaacaacactatatatggtacacgctaagcattctaatttaaactcttgtatttaattcaatttgtggtagctgattttaaagcctttttgaaagtgccgttaacttacgattgcaagcgctgaactagaccattcgaaaatattttttatttttagcgttcgttgtcaagactcaattcaatctttgaccaatggcttaatagtctctttgatcaattgaccggagaatgacttcattaatgcccacattatctggtgtatcgatggcgttcattacggcattagcgacatcggttgctgttaatccagtttcagtttcactcttgagaacagctgctcgtaattgcggatcactaatccggctggctaattcggtttgcgcatgtcctggagagattaacgttgatttaatgcccattccaacttcttccacacgtaacccttccatcaccgcgcgcattgcatatttagtggctgaataaacggataagccttcaccagtgaaatgaccggcaactgaatccgtggtaatgatatgaccactcttttgctgttccattaaaggtaaggcatatttaatgccatatagcgcacctttgatattaatatcaatcatagcctcccactcatcgactttaccatcgcgtagcattgagacgggcattaagccagcattattgaatagtacatcaattctaccaaatttagcgattgtcaattcgattaaggcttgcatgtctgctaattgcgtcacatccgtttgctggtaaataacctcagtgtcgtattgagcggttaacgccgttgccaacgccgccaacgcacttgttcgtcgagccgctaaaacaagttttgcacctttggctgctaataaggtggccgtctctttaccaatcccacttgatgcaccggtaatcacaacgactttattttgaatatcattcatttcttttcccctcactttttagttgataaggttagtatatcgggtacttcgcaataaataattacgcactttcaactaactaacgcacctcaaagtaagttttgtgaaatcactaaaaagacgacaacattctttttgaataaatgttatcgccttctttaaatatcgtatttctcatggtctcgataatccaactgcacatcatcaccattgctctgtaaaaagtcgattctatcttcgccccacttggccatcattcctaggacggaaaccaatgatttgccgtacgcagaaatcgcatactccacgtgtgggggtacttcgttaaaaacttttcgagtaatgatgccatctcgttccaattcacgtaattgatcggttaaaactttggctggaattccctgaacgactcttttaagttcggccggtctttgaggtcctgccacaagatgacagagaatccacggtttccatttcattccaatcactgataaagtcattaaaacaccgttggtataatttttttgtggctcgttcaaggcctttcctccacttcttgatgctgatttgtttgtctatcataccatcaaaaaaaggatcaggacaatcttatctgtcctaatccctgattaattattctggtcgataagccgctttagcagcgttcatcgccgaccatgccttaggccagccgacataaaatgataaatgcgtaatcacttcgacaatttcagcttcagtaatgccgttttccttatcaatctttaaatgcgctggtaattattcaaaattaccacctgaaatcaaggcactgatggtgattaaactccgttgatgtgctggtaactctgattcacgcgaccaaacttgcccgaataaaacatcgtcgtttaattcagcgaatttaggtgcaaaatcacccaatagatcgcggcctgctgtttgtttctttgccattttaaaaacccctttctgaattaaagtgcgtcataaagcgcatttgaaacagcttctaaccattctggtgtgccggcagtgatggcgacatgactaaaccagctatccttagtggccccatgccagtgtttgatgccgtctttagtaacaatcacatctcctgggactaagtgttgtgctgctttaccttcttcttgataccagccttcgccaccagtcaccaatagaatttggtacccagcatgatggatgtgccaattgttccgacaaccaggttcaaacgtgacattcccgacaccgacattcacgtctggttcgctcactaacattgataaataactttgaccgacgaagaagtcttgataagccacattagcttctccaactgggaataattgtttttcttttaattgttcattcttaaccattctaataacctcactttattaggattcaaatcgttgtaaatacgtttcaaaactctctgcttgatcgatactctgatccaatttaccatcataccaatcaattttacgcgttaggatctgtaaatttgcttggcgctcagccaattcggcttcagcttgagcctttgttttttgcaataaagctttgcgcgcttcaatcgtcgcgtctccttgagcccgcaatgcaacatattgctttaattctgtaatccgcataccggtcccttttagatggagtataaacccgacccacttaacgtcctctaatgtataaaagcggacaccggccgcatcgcgttgcggcataatcaagccttggtcttcatagtaacgtaatgtgtaagtcgacaaaccaaccaatttagcaaactcgccgattttgtactgctcttgtgccatcgacatccctcctacaaaaatagcttataccttagagtatactataaggcaagttttttaataaataggacgatcgccatcaatattcggctgattaatgccccaacttgccccaattcctttttcaggatgattaactaaatcaacaacaacttgcgcgatactccgtcgtgaaataatcgtccctttaaacggtgttcccttttcagttaattcgtaatcaatccgatcttcattggtcatataggcacaacgtaaaatggtatagttaagcgaagattgttcaacaatcttcgccgcccgccgcgtgtcttccatgacttcatggccgactgcttgttcattccactcaccaaaagcacctggcacttcatgatacaagcctaatccactgatatagattaatcgtttgatgcccgctgcagtcattgtcgcgacaacgttttgcattaatggttcgaactgcccgcctaaatttgcgtaaacgatatcgaccccagctaaattgtctgccaacagctcttgatccaacacatcaccttcaataaccgtgacatgtggattttgtgctaatgcgcttagccgttcagcgtgccgtaaatatagcacgagctcatgttgattttctttcaacagttgctcaataactaactgggccacttgtccggctgcccctaatactaaaatgcgactcattttaatcaccccttcttcaatgtctttagcatattccttaaagtacactcgaaggcaagccatttttcaaatttaattggtctaggttgctacttgactttcaaattaaattgactaaaatgaaagttgttattaattataatcattataaagttaagcaatatgtatattattggcaaagtttccatcaaaacctggatcgctgatgttgtactagcgtttaaacagtattttttacaagtaaattacttcttcttcgtgctatctactctgttattcatcttatcgattatatgctgcttacttattttcagcaaaagaaatataaataaaatagcaattgcgctaacaaccattattcttgcggggttagcagccgtcctccctatgttaactaccggttcaatcggtccaatcagaagctatgcacctacttatcctttactgctattgctgctaactattatcgttgtagatttaatttccaaactaagtttttctaaattcattatccccattgtcggaatagtgttattatcttgcctattagttcaagctaagataacgaacgatttcggtgtcagcgagtacaatcaatttcaggcagagctcgaattcaaacaggatttacagaatagatttgccgatttaggtataaacaacactaaagattataaattcgcattctacggtgcaaagggatttagttcgaaaaacattataaaaggcgatgttttgggtaaatcgttgtttgaatgggatactattggcgaggtgggcgtaagtaatcgagctaccgattttcttaacgaccaagggttggaattaaatcctgtcaacgcaaaagaatataaaaatttacaaaagtatattccgaaaatgagagcttttccatctcattcgagcgtaaagattgtaaaaaactatgtaattataagattgtcggaataaaaaagacacaccccctaccgaccaaagtaattgggtgtgtctgaccaaaaggtacgcataagcgtaacgctttttgtgtacctattttaccataaaataggagtgattttaatgcttgaatacaaaaagaacccagcaatcaaggaatacgaaacaaaaaaaggcgtcaaaaagtatatgttccaaatctatacgggcattaatccagcgactaacaagaaaacgacaactacccgccgtggcttcaaaacacctgccttggctaatgcggcatatcgtaaaatcgaagcccaagtgatgaataacaagtacgagtttaacaccccacttgaatccgacggcctcacattcaacgatgtttaccagcggtggtttactgaatcgtatcgcaagacggttcaatcaagtacggtctataaaaccaaacaaatctttgattgtcatattctgccggagattggcgcaatgaacatggatgatattacgccggaagtcttgcagccaatcgtaaaccgttgggcaaccaagtacgctaagttaaacatcgtaagccgctatgctaatcgagtatttaagtatgcctacacgatcaaactgattaaaagcaatccgtttaatcacgtattattaccagaacgacaagtcaataacacaaacaagacgcccagcacaaacttctttagcgctgacgagttagacaagtttactcgctttctggtcaaaggtcgtgctaatggcacggtgaccatgatgcacgccgtgtacttcatcacgatggcttacacggggttgcgtaaaggtgaactgttgtcacttgaatggtctgacgttgatttagagaacaataagcttgatgtaaataaaaccttagccatgaatgagtttggcaagttggcaacccagccacctaaatggctgtcttatcgcacaatagacattaacaaccttgtagctaatacgttgcaagaatataaagaatttagtcactctaatctcgtcttcccaagtgaaaaagacacctggttgaaccttggcaagcctaacaactggttagacagcattatagatcaaggtgccgaaacgtttaaaaccactttccaactgactggtgatgactactataaaacgtttgtgcatcgtattaccccgcatggtttacgccatacgcacgccacatcgctgtttgagaaagataatacgattacacctaaagcggttcaagagcgcttaggccacaagaatattagtgtgacaatggacatttatactcatgtcacatcaaaccaaaaggacaaactaaagtctgcgttagacgtcgattattgagggttagtcaaaaagttagtcaaaaaaggcagcttatccgttggggctgtaaggattagcgaaaattaacttaaaaacaccatttctagcacacctcaaatcaaaattgactaacctttttgactaacctttgatagcaaatataggcaaatatagtaaattcaagagaataagaaaatagcctaatcactgatttaacagcaattaggctaatatcggaaagtataagatattcaagtaaggagagtacaggatttgaacctgcgcgccggtataagccggttcgacggatttcgagtccgttgcattaccactctgccaactctccagaacgttattcattataacagacttctaaagaactgaacagcgtaaaacgcaaaaaaatctacgtgcgcccacattctattcgatcaccaccatcccatcttgatcaaattgccagtcctttgagtaagcgacttcccaatagtaaccatcgggatcactgaaataaccactatagccaccccactcgccccattctggcgctttgatgagcgtggccccgttagcgagagctgttttaaatgttgcatcgacttccgcttgactatgcgtattaaaggcatggatcacgccgttgaacgttcttggaaatggatgattatctgcggataagccaatatcggctagtagtgcagtgtacggaaacaattccaacttggtcccagtattattgaaaaagacgattgtctcagcattttctaaattcggcgcttgaaagccgagtgcttggtaaaactgacgtgacacggttaaatcctgaacacctaaacaaattaaatggatactattcatcaaatcacctactcgttttaaattaacctgattgtatcaatccgaagctaataacgcaattttccccgttaattgaccaattattaaatttattgaatcatatttctttttataaaaaaattcgttatacttaaagaatcttaaatgatagaggtttattaatatgaagatttcttatcgcaaactaccgtttttattcaacttaattttcttagttgtaacggttttacaatctttgatcattctagtggttaacccccacgttacgaaattcatccccacttatatggatgccatggcgaaagtatggtggttgtgcattattgctattattttgcatattgttgcttatttattatcactcgatcagaatttgattttactggcatacttatgtgcaatcgtcgcttacatcatcttgattttagtccctaatttattactagttgcccttttcttgttagtggttagcttgatcatttcatttaaagtctatcatttccattatcgaacacctgcttagtcctcgtcggagggctatttttttatgcgctaacccatttaatttatggtataattagtttgaaattaagacaaaagaggttctagtaatgaaacgactaactgcgattctatctttattggtactttgtttactgccttttgtaagcccttacttcttcggcaaaggcatgcgcttttctagtaatcatcaaaaaaatccaatccgctttgaagtttgtcggcatccaaaggtccaccacgcagtcgatcgtgatggcagtgaacaaaaattaaacgccttcaaccaccgctgcgaacggttctttaatcaactcacacttgcgcctgaagcattctacgccgtagctggatttcttggatttaccgtctttattctattattagaaccactacttgcactcctaatgaccctcaagaaagtgccacaacccaaaaaggcacaatcccatactccgcagaagcatcagattgcgccttataagtggcatttattagattagtttaagttcaacttttgataagtataatggccctcttttagtgattgattcgcatatggcgtctcattgagcaacgccacatattcttgggcccgttgttccgaactaaacgcccggatcattttacttttatcataataaagtgggtttgcttgatataaaacaacgtagatccattgattcatctgtcatcacctaactttgtaatccacataaagaaagaccaactcgtaatgagtcggccttttttaatgtcatcttaacgacgagcttctttgatacgagctgccttaccacgtaatgcgcgtaagtagtataacttagcacgacgtacacggccatgacgagtaacttcgatttgagcaacacgtggtgagtgtaatgggaaagttctttccacacccacaccgctactgattttacgaactgtgtaagtttcactcacgccaacaccatgacgtttgataacaacaccttcgaataattggatacgttcgcgagtaccttcgacaacacgcacgtgaacacgtacgttgtccccaggacggaagtcaggaatatctgaacgtaattgagacttagtaatttcttgaattaatggattcattttgaatctctcctttttccacagatattcattaacgtcttgcgccagcggaataccgttgttttgtgactaatcatcacaatttttaattttagcataattcaactgagaataaaagccttatttttcagccgcttcttgcttaatttcttgtaaccagtgcaactgatccttggtcaacgtcatcttcgctagtaagtctggacgccgttcatatgtccgtttcaaggacatcttctcgcgccactcgttaatgagcttatgattcccgttcatcaagacttcaggtacctttaaaccgcggtattctggtggtcgcgtatattgtggatgttccaataagccggtcgaaaaagaatccgtaaccgctgattgttcattccccaagacgccaggtacaagccgcgaaatggcatcaatcatcaccattgcgcccaattcgcctccagtgacgacgaaatcgcccaatgagacttcatcagtgactagcgtgcgaatccgttcatcatagccctcgtaatgcccacagataaaaaccaagtggtcttcttgagcaaattcttcggcaactttttggttaaacgttaccccagctggatcgagcaaaataacccgtttgtgccccggattcttggcattcacttgatccatcgcctcaaaaatcggttgtggtcggagcaacatccccgcacctccaccatacggcgcatcatcaaccgaattgtgtttattgactgaaaaatcacggaaatccgtcacttctaaatcaattaagtcacgatcaattgccttaccgataattgattgggataacccattttgaaccatatctggaaataaacttaagacatcaatcttcattatcaatcaatccttctggtacttcaacgtaggctttacccgcttcaatatcaattttcttaacgactgacttcaaaaatggtaagagtaagtctgaacggccgcggcgcttgatcacccagacatcattgggacctggatcgatgatttctgagactttcccatagctggtcccatcggcttcttcaaccacttctaagccgataatatcaccgtagtaaaactcatcatcttccagatcatcttcgcgttgacttgcagcaatctttaaattatggcccttgaactgttcaacatcgttgatattgcccattccttcgaactgtaatagatagaattgcttgtgttggcgcattgccgccactttaacatcaacaaggccattgggcatttcgacggccagttgcacgccttttttaaatcgtgaatccgtaaagtcagtcgtcgcaatgacccgcacttcaccacggatgccgtgggtattgacaattttaccaacttgatagtatttttctggcatttaatttctccttaatcgacaaaaaacgcctaaataaaacatctctgcttcatttaaacgtttttgttaggcatctacaatatttaaacggacccgtttttggtatggtgctttcacactatagacaatggtacggatggactgtgcaacccgtccctgcttgccaatgacgcgaccgatatcacttggattaacctgtaagtcaaattccataaaacgttctgtctcatgttcagtcaatttgacgtcttccggatgttcgacaagtggctgaacaattgcaataattagttccttcacgtctgtcataacgaatccctactttttagcgaagcgtgcttcgtgatatttttgcataatcccttgttttgataaaagattacgaacagtatcagaaggttgtgcgcctttttgtaaccaatccatgataacttcttcttctaacttcaagtcaactggttctgttaatggattgtagtaacctacttgttggataaagcgaccatcacgtggtgaacgtgaatctgcaacaacgatacggtagaatgggcgtttctttgaacccatacgtttcatacgaattttaactgacattaatgccacctcctattaattctttaacatgtcataatataccaaatttcaaacgccgtgtaaagtgttttttctttacaggacaaatttttttaagatttaaaacgacgcgcgttcttgagacgtttcttcttgtttttcttttgttttttcatcattgaattcatggccatcttacccattttacccttgataccgttgcccattaaaccttccatgccgttaaagttgccctttgacatttggttcatcatctttttcgattgattgaattgtttgatcatccggttaacttcaacgattgggcgaccagcaccagccgctaaacgacgacggcgactaggattcaataagtcaggattttcccgttcttgtggcgtcattgattgaacgatggccttcatatgcgccatgtctttcggatccatcttgatgttcttgagttgtgggttattggccatccctggaatcatcttcatgatatcttccaaaggtcccatgctctgcaattgatccatctgatccaagaaatcgttaaaatcaaagctattttctttgatcttttcagccatatcagctgctttttgctcgtcataatcttgttgcgctttttcaatcaagctcaacatgtcacccatcccaaggattcggctactcatccgatctggatagaaaatgtcgagttgatcaagtttttcaccttgaccagtgaacttaattggtttgccggtgactgcacgaattgagagggctgccccaccacgtgtgtcgccatctaacttggttagaacgaccccggtgacatctaaacgactgttaaagccttcagcaacatcgacagcggcttgcccagtcatggcatcgaccgttaagaggatttcatttggatgggctagctcattaatatcagccaattcttgcatcaaggcttcgtcaatttgtaaacgaccagccgtatcaattaagacgtaatcgttcttttgtaaggccgcttgtgctaacccttgacggacgatttcaactgggttgacatccgtccccatttcaaagacttgtgcgtcaacttgcttgccgacggtcttcaattgttcaatcgcagctggccgataaacatcggcggcaatcatcaatggccgtgctttttcgttttggattaaatattttgctaatttcccggccgtggttgttttcccggccccttgtaacccaaccatcataatgattgttggaatatgtggtgatttattcaacggcacagccgtttcacccatcatcttcgttaattcttcatcaacgatttttacaatttgttgtgcaggtgataagctatcaaggacttctgccccgatggcgcgttccttgacgactttaataaagtctttaaccactttaaagttaacgtcggcttctaataatgccagccgaatttcgcgcatcgcttgattgacgtctgtttcggtaatcttccctttacgccgaagcttactcaatgcgccttgtagtcgttctgttagcccttcaaatgccattttttatcagtcctttaagttaattattgttcggttaaattcagtaagtcagccaacaagcgcatcagttcttgatcgtctggatagtgcgcttgaatatacttttgtagcgtatctgcactggcattttgctgttcataattacggtaaagatgtagcttttcttcgtaaccctctaagattttttcagtccggcgaatgttgtcatagaccgcttgccgactaacattgtattcagcagcaatttcaccgagggaaaaatcatccccataatataaagagatataactatgttgttttgccgttaaaagtgcgccataaaattcgaacaacgaattcatgcgtgcgttttgtgcgagttccatttgacgcctcctagacttagtttgacctaagtattagagtaccgattttaacgggcttagtcaacgttttattgcgcgatttaactagaagtttgtgcattaattatcttttcactggtataaacgaaaaatcatgctaaaatagaactgtaagctttttcataacttaaattggaatttctatggaggttgtatgatggcagcaacaattatctattggggcgttatattcgcattaatcggttgggggatttggaacttaatcttctcagtcgtctatttaaagaacaaggaaaatggtaatctttggttcttcgccattttaaacatcttaaccttattattcgggctattattctggtgggtcttcaacaatcacgcttggcaagaatactggttggttaaagcaaccgcaaccaacagtctactaggtggcgttttaatcgcctatgtcgtcttaattatcgcccaagtgattttgggacgcgaaccaaaagccaaaacagcttaatgctaaaaaagaggatcgacacgtttgtcggtcctcttttctaatgttgtttagcgattaatcgcgcgatattttcactgacttgcgttaaattaacttcagtagcttcaattgcttttgctaatgacattgcgccaggtgttgtgcagaaaatactgtcaattcctaattcataaagcacatcaatccccgctccaatatatccggcaatcgcaatcaccgtcgcctgtggattaacttgtttaaccgctttggcgactccaattggcgtcttaccatattgtgtctgaaaatcgattccgccctccccagtgacgacgatatccgcatctcggacaatctcagttaacccagtttgcgccacgaccatctcaacaccaggttgaacctgcgcatccgtaaacgccaataaaccagcccctaagccaccagcagcacccgcacctggtatttgcgcaacagatttccctaaatcacgttcaatcaccgcagcaaagtgcgttaaattccgatcaagttgcgcgaccattgctggggttgctcctttttgtggaccaaacacggctgatgcgccattcgggccgaaaagcggatttgtgacatctgatgcaatcacaaccttaacccttgatagtgccggtatcatatgcgtcgtatctatccgtgctaaacgcgcaagcgccccaccgcccagtggtaacacctgtccgtcaacatctaacaaacgcaccccaagtgcttgtgccattccagcaccgccatcattggtcgcactgccgcccaaaccaatcacagttgtttgcacaccttgtgctagtgcggctgccattaactgaccggtgccataagtcgttgttatcaacggattttgcgtttgcgcatcaacatactgaatcccgctagcagctgccatctcgatcaccgccgttttgccatcacccaagatgccatattgtgctgataccgtttggtccaatggattttgcacttgtgcggttaagaaccggccattggtcgcatcgacaagcgcttggacagtcccttcgccgccatctgccattggcacttcgacataggacgcgcttggtaggcttttttcgaatcctttccgcattgcacgagccgcttcttttgcggtaacagcatttttaaatgaatctggtgctaacacaattttcatctgttaatctctctttcttctaaaaaaaggctagaacaaattatttgtcctagcctttttgctatttaatcgcttgactgacgtctgtatcagttgttttttgtggcccatcaccgacaataatatccttgaataagccataaacaaagcggtttggatcaaagagttgtaagtcgttcatttgttcacctagaccaaccatcttcactggtaagtgtaattctgtgcgaacggctaacacaatcccacccttggccgaaccatctagcttggttaagataatcccagtcacatcggtcgtttgcttgaattgtttagcttggactaaagcattttgtccggttgttgcatctaagaccaacaatacttcttgcggtgcagctggtacttcacgcgtgatgatgcgtttcactttttccaattccttcatcaagttgacgttgttttgcaaacgaccggccgtatcaactaataaaatatcgaattgttcttctttagcgcgcttaaccgcgtcatagacaactgacgctggatcactccctgctgcactagcaaccacggggacattatcccggcgaccccattcttgtaattgttcgatggcgcccgctctaaaggtatcaccagccgctaataagaccttcttacccgctttttctaattggtgggcaaacttcccgattgaggttgttttccctgcaccattgacaccaacgaataagaagacagttaattcgccttgtggagcgaaatgcaattgattatcttctgcttggctttcttgaccgtacaaatcaactaacttttcaacaatcgcttgtgaaaccgcttctggtttcttaacgttacgcaacttcacttcgtcacgtaattcgtcagcaatcttcatcgctgtttcgtagccaacatcggcttcaattaacatttcttcaacatcatcgaaaaaggcttcatcaacacttctaaagttagcgaacaacgcatttaagcgttgcccaaatgtgagccgggatttttctaatccatcatcatacttcttcgtttcagcagcttgcatgtcgccagttactgcttctgtttccggcacttcttcaatcgcatcggattcttcagttactgccgacgcttcaactggttctggttctggttctggttctggttctggttctggttctggttctgagtttacgggtgccgccgttggtgtgtcaagcggtgataccgtttctgaatcatcttcagttgctaaactggctggttcatcggtttcagttttctcagctgccgcagtttctgcaggggtttgcgattcaaccggcgtagcgtctgattcaaccggtgtttccggtatcgcttggtcttgttcaaccggtgtttctttttctggttcggctgagaatgcttttttaatacgatcaaataatcccatggttttcctcctaggctgttgcgtgtttttctaatgaaacggaaacaatcttcgagattccagattccgccattgtcaccccgtataagcgattggcttgggtcatcgtcccttttctgtgggtaatcacgatgaattgtgtatcactctcataacgtttcatgaaacgaccgaaacgatcaacgttggcttcgtccaacgaagcttcgacttcgtccaaaatacaaaacggcactgggcgtacttttaagatggcaaacaataacgtaatcgccgtcaatgcgcgttcaccaccagataaaagactcaagcgttgtagtttcttaccaggtggttgcgcaataatgtcaatcccactcgttaatagtgcgcttggatccgtaaacgttaagctggcatggccgccaccaaacatgatcgggaagatggtttcaaaagcagcggcagtttgttcaaacgtttccttaaaccgcttttcaacttccgtatccatttcagccatcgatgctaataattggcgcttagcgtccatcaagtcggcatcttgttgcatcaagaaatcgtaacgttctttaacgcgttgataatcatcaatggccgccaagttgaccgttcctaaatcagctaagccgagtttcaataatttcaacttagaccgcaattgatcgtcggttaagtctgatgcggccaaagcggccttggcggcttcgtaagtcaattggtaatcttcgctcaatgtatttaagcgttgatcaatgttaattttaacccggttgagcccgacagcattttgttcttgctcagctaaactatttttttgtaattggtagacgcgtgtggccttggcttgaagcgtttgttgttccgccttcagcgtttctttttgcgcgcgttcagtggctaacttcgcttggactttctcaatcaaagcattggttgcctttagcagtgctcgtcgttctttttgactcgaagcgtcttcttgatccgcttgttttagcgcagctagtttatcctgactggccttcaactgggctgccaggtcgttgctattgcgagtagcaaccgttaatttctcctgaacattcttttgttcagcttgagcgacagccaacttggtttcgagggctgtttgttgttgcgcaatttgtttttgactctcatcaaaatgttgtaattgctcattagctgtttcgagatctgcttgcagctgtgcaatcgacgcaacaatttcagcttcggctgccactaattctgcctggcgttttaaatctgcctcataagcttgttgttgttgttgcacttgataatcggttgcttgttgttgccgttcaaactgactcaaacgttcgtcagtcaaggctaacgtattttgggcagcttgatattgattcttagcggtttccaatgccgcttgtttcgtatttaattctgcttggcgtgccgttaattgagcttttgcggcttggacactggcttgcttttgatccaaagcgacctgcatcttggcaatttgaccttctaaatcagtcaaggtttgcttacgcgcaagtagcccaccattgttttgtcggttattatggcccccagtcatcgaaccacccgggcttaaaatatcccctgctaacgtaatgattcggtaacgatgccccgtcaattgactcaatttaatcgccggctccaactcagtcgcgacaatcaaattgcccatcaaatggttcatcaccggtcgcacttgttcatcaaactgcacaagctcactggcaattccgataaatccaggctgctgttgtaattggtgaactaagctacttggtagtaaacgtggtttgacaacgttattgggtaagaaagttgcccgcccaatccgattggttttcaaatactcaatcgcttgtttggccgtctgttcatcccgtgtcacaacttgttgtagctgtgcgcctaatgctaattcaatcgcttgttgatactcactgggcacttgcatcaattccgctacagcccctaataaaccagggaactgttgtttttgcttcaagacagccttaaccccttgataaaagccggcgtagtcatcatttaattccgcaagactggcttgttttgctttcgctttttgtaaaataccagacgcttggaaccaactattttgttgattttggtaagccgcttggtccgtgttaatttgcgtttgtaattcggccaactcattggacaacgtttcgtattgcgctttgagtgtttcaagttgggctttttgggccgcttgttctgcctttttttgtgccaattgcgtcgatgtctcatcgactgcactatcttgccgtgcaagttgcgttttagtttgtaacaagttcttttctaaatattgttgttcattatgattggtcgtttgggcttgcatctgatcgatgtattcttgacgaatttgttcaatcttcgctttcagttccgcttcactaccagacgcttggcgtttaagggtggttaactccgtcttcaacgcccttaatgccgtcaccttttcttcataacttgcctttaattcagattgattggcttgttccgccgttaattgctgttttaatgtgtcgatctgttcgactaaactttggcggttcgcatccgtataattagcgcgctcttttgaaacgttctcttggcctaatagattttcggccaagcgagacttttctaacaacgtctgattatcttgttctatttgttgttccaactgggctaaggttgcctgattctcggtttgggcagccgtcgtcttaacgatgtccgcttcaatctcttgcaacgcttgcgcaagggtttgcgccttttctttgtacgtcttttggtcagccactaattgatcaatttcaatcaccaataattgttggtgcaacgcatcatattgcgctttttgatccaagtaatcctgcgcaatactgctctgttccttcaacggttcaacttgtccccgtagttcatggagaatgtcggtgacccgactcaaattttcatctgtttgatctaattcagattgagcctttttcttttgttgtttatatttcaaaacaccggccgcttcttcaataatattccgccgatcttctggtttactgttgaaaattgcttcaacccgaccttgcgaaataatcgaaaaagattctcgcccaaggccagaatccataaataaattaacgatgtcttttaaccgacaactcttttgattcaaataaaactcactatcgccatttctaaataaacgccgcgtaatcgtgacgttggcttgttcttgtttcaaatattgatcgctgttatcaaaagccagcgtcacttctgccttattcatctgtggtcgaatatcagtcccggcaaaaatgatgtcgggcatcttttcgccccgtaagctcttggctgattgttcgcccatcgcccaccgaattgcttctgtgacgttacttttaccgctcccgtttggtccaacgatgcccgttaaaccttctgaaaaattgatttctgttttatcagcaaatgatttaaaccctgataaaaccaatgactttaactgcatgcactaaactccctacacacggcggttggtttcaactgtcgtttgcttctttctttatttcagtttggcaagcgccactttagcagctgcttgttcggctgcttttttgttccggccaacacctgaacctaagacgcgatcgcccatcatcacatccacttcaaattgacgggcatgtgatggtcccacttctgccaataacttatattcaatctcaacttcaccatcttgttgcaataactcttgcagattggtcttataatccgtttggtctgaaaattcaccggcttcaatcttgggaaagacaacttgttcgatgaatttaacaactgcgccacgcccttgatctaagaacaaagcgccgttaaaagcttcaaataaatcttccaaaagtgttgctcgtgcccgcgcaccgtttttttcttcccctttaccaaggcgaatgtatcgatcaaagtgcgcttctttggcaaaactactgaaactcttcgtgcagacgattgccgcccgtaagcgtgtcagtttgccttctggccagtccggatattttttatataagtattccgaaaccgtaatttccatcaccgcgtcacccaagaattcgagccgttcgttatcacgaagacccaactcccggtgttcattgacgtatgacgaatgtgtaaaggcttcgtccaatagtgctaaattctgaaattcaatgccgtagcgggctcgaagctcgctcactagtgctgcatccaaaattaaattaccccatttcaactgtttaatctttcactattataccgtttatacgcttaaaaaaacagcgtcgttcctagcaaaccgtttcttttattaatcactaaaaaacgcctgttttgaagtattcattgtaacacgcaaacgaatatttcaaaacaggcgttgctttatgcagatggcgttgtcattgctgctaaagcggtttgataactcgctagttcagcttcagttgcatagacatagtgttcatcggccacttcgcgcaattgacgaccttcattatctgcctcaattgaactatcataagcaattcgccgacgttgccgctcgacctttggatcaggtaacggcacagcagacaatagactttgcgtatatggatgcaatggtcgatcataaatgtcatcggctgatgccaattccataattttaccgttatgcatcaccgcaatccgatcactaatgtatttcaccatcgataaatcatgtgcgatgaataaatacgtcaagttttgctgttcttgaatttctttcatcaagttaaccacttgtgcttgaatcgatacgtcaagcgccgaaatcggttcatccgcaatgataaatttaggttttaccgcaagcgcgcgggcaatcccaatacgttggcgttgcccaccggagaattcatatggataacgcgttgcatggtctttattcaaaccaactaattccaaaagctcgttgacgcgtgcatcacattctgcatcatttttaaccaaatgatggatatgcaagccctcagcgatgatatctttgactttcatccgtggattcaatgatgcgtagggatcttggaaaatcatctgaatctctttccggaacgccttcatttcacgactatgatttttaatcttactaatgtcacggccatcgaatagaatttcaccatctgtcgggttgtatagccggatgatactccgcccagttgtactcttcccagaaccagattcacccaccaagccaaacgtttcgccttcatagatttcaaatgagacatcatcaatggctttgacttcggatttttttccttggctaaaatattgctttaaatgtttaaccgacactaatacttttttatccttgtccatcaattgtccctactttctcttgaacttgtgtcgcctggtacttagccatcattgcacggacggctgctggtggttccacagctggtgcatctggatgcaacaaccaagttgccgcaaaatgcgttttcgacacttggaaaaatggcggttcctgttccacatcaatttgtaaagcatatggattacgcggtgcgaaggcatccccttttggtggatccaacaagtctggtggggtccctggaatggcttcaagacggccagaagtatcaagtgttggcattgagttcaataagccccacgtatatggatgcttgggttgataaaaaatttcatcaaccaacccatattcgataatcttaccggcatacattaccgctacgcgatcggcaatccctgccacaacacctaaatcatgcgtaatgaaaataattgaggtttcaatcttgcgttgcaattccttcatcaaatcgataatttgtgcttgcactgtcacatcaagcgccgttgtcggttcgtcggcaatcaggatttgtggataatcaacaatcgcaatcgcaatcacgattcgttgccgttgcccaccagaaaattgatgcggataatctttcatccgtgctttggcattcggaatacccaccaactctaaaacactctgtgcacgtttcattgcttcttccttattcattgttttatgaatcaacaagggttcagcaacttgtttaccaatcggcatcgttggatccaatgacgtcatcggatcttggaaaatcatggaaatatcgctaccacgtaaggcattcatttcctgttctggtttttgtaagagatcttcattgtgatacttgattgtaccacccttaatttgagcattacccgctaacaagcccataatactacggaccgttaccgacttacctgaacctgattcaccaacaatcgctagtgtttcgccttttttcaagttgaaactgacatcgcgaatagcatggacgtcccctgcgtaggttttaaaatcgatacttaaatgtttaacttctaaaatatttgccatttgacgacctccaatgatgaaaccgcgtggaaacggccttgtattgacatgctttttgaaactgactctgcttctaaacgtgctttcattaactgctttctgtggttagctacgtctaataaataatcaacaagttgattattcgtcagactatgctaatccgcgaaagctaaccgcctacttgcacacgctatgattttggatcgaatgcgtctcttagtccgtctgctagtaagttgacggcaatcatgatcacacagaggactgctgctggataccacatttgatatggcaagaaacggaaagctttttgcccatctgataataacgtccctaatgaagcattcggtgctggaatcccaatcccgataaagctcaagaacgcttcgaagaaaatcgcactcggaattgtaaacatcgtttgaataataatcgttgaggataaattcggaatcaggtgtttccaagcaatcttggtggaactttcacccaacgtccgtgcggcgagcacgaattcttgttccttaagttggaacgtttgggcccgaatcaaccgggccattgtaatccaaccggtaaagccaatcgcgatgacgattgacaataaacctggacggagtaccaacatcatcaagacaaccacaattaagtttggaattgatgaaatgatttcagttacccgctgcatgaacatatccaaacgaccaccacgccatccggaaacaatcccgtatggaatcccgattaataaatcgaccaatgtcgctagaatcccaattaataaggataagcgtgtcccgtataaaattcgtgataataaatcacgaccgagataatccgtccctaagataaacgttttgcctttgggaacgcccgcttgttgatatttatcaactttaacaccggaaacgtccatcttaccggtaaaaccagggatattccccgatccaattttaggcggtaagttagcgtacgccacattttgtgtatttggactttgtggtgcaatcactggtgccaataaagcagccaacatcacaattaagaggacaactaacgaaaccaccgcgactttattttgctttaagcgccgaatggcatcttgcgtaaacgtcaatgatggtgcactaattttttcttgtgcttcatgcgtgtcttgtgtaaggggcttgaatgagcccgctggtattttaatatctgccatttagtgcgccccctgactgtcacttaatcgaattcgtggatcaataatcccgtaaagaatatcgacgactagaataatcactgttaataagaatgaatagaaaatggtcaagcccatgatcgttggataatcattcgtcataattgacttcacaaattgctccccaattccgggaatcgagaaaatattttcaacaactagtgacccagtcatcaagttgactgccatcggcccgataatcgtaacaaccggaatcattgaatttcgtaaggcatgctttgccactgtttgccattttgaattgcctttggctttagcaagttcgatgtaatcactgtttaaaacatcgaccatttcagtccgcatgaaccgagccgtattcgccaatggtgcaaccgctagtgctaatgttggtaagacactagatgaccagccgtcccataacgcaattgggaatagttgtaatttaaaggcaaggaaaaattggagtaagaccgccaacacaaagttcggaattgaaatcccaacgattgaaaagaacgttgcaacgccatcgacccatgtgttcttgcgaatggccgccactgcccctagtaaaatgcccagtaatgagccgacaatcatcgcttgtgccccgatttgtaatgaaggtcctaaacgcgtcatgattaagctcaagacgggctgattgttgaactggaaggatgtgccaaaatcaccatgcaacaaaccacctagatagatgaaatattgctggatcaatggtttgttcaaaccgtactgttcattcatgatccgtaattgatcagcactcattttttcctgattcgtatatggcgtccctggcatcaacttcatcatgaagaaggtcacagaagcgacaatgaatagggttagcactaaatagaatattcgtttaataaggtatttactcataagttcgctcctaacaaaaacgggcttcattgtttttcaacgccgaaacccatctttataaagtcagtttatttttctaaataaagtgagacattattgtagtttcctgaagggccgtagtctaaacctttaaggcttgggttagttaagtacgccacacctgattgatacagtggaatgacacctgactctgtattcataatatcttgtgctttaacaaggttttgccatcttgctttaggatcattggcgttgtcacctttacttgccttgatctgtgcatcgtattcggcattgctccaatggccatcattgttatcgccgcctgttacaaacaagtctaagaatgtgattggatctgggaaatcagcgttccaagcactaaccaccatgtcgaaatcaccgttcgttgaacgtgttaaacgagtcttaaatggcacgttcgctaatgtgactttcaaacctggtaagttcttttgtaaagtattttgcaaatattcggattgtttcttggcagtatccgtatcatcgccaagtaatgtgtaattgaatgttttgcctgtttgcccagtttcagcaaggccttcgttccaaagttttgttgcttctttagggttgtaacttgcatttttcttacccgctgcgtctaaatcatcaacaaaatccttcttagttgttgggtcaaatgacatattctttggtgtcacagaagcaattggacttgaaccatcacctagaacctgtgcgactaattctttacgattaattgtcattgaaattgctcggcgaatcttcgcatttttaaagattggattcttttcttggttgacttgcatgtagaatgttgctgatttttgtaaggttgagtaatgtggatcgtttttcatttgtttagctgtgtcaccactgatcgccgtccgatctaatttattactttggaagaggtttaaagctgttgatggatctttaaccacttgatacttcaacgtcttaaccttaactgctttcgtattccagtaattggtgtttttaacttctttccatgagctatctgggccattccaattttctaatttataagggccgttgaaaactaatgttttagaatttgtcccgtaactcttgccagctttcttgaccgcttctggatattgggggaagaatgttgaactggtcatcaattgactgaagtatggaattggtttttcaagggtgacttctaaggtgtgtttatccttagcgactacacccaatgaattaaccggttccttaccagtcgtgatgtctgctgcatttttaatgccttcatagatataagcatattgtgaaccgacctttggatcaacgactctgcgccaagcataaacgaaatcttctgccgtgaccggttgaccattgctccacttcgcgtcttttcttaatgggaatgtatatgttaaaccgttattagttggtttgaccactttagtcgcaatcgccggtttgatttctttaccctcgtagcggtaaaggccttccatcgtatcggttaaagcctgcgcaccgatcacatccgtatttaacgctgaatccattgtcgcaatgacatccccagttgcaaaactggctgtgtcagtcttaacggcttccttgctacctgagttaccacaagctgctaataataatgtgaccgccactgttgttatacctaataccaaactcttttctcgtttcatatggacactcccttcagttattaaaaataataatacatgattaaaaatgaaaagtaaataataaagattaaaatattctaatttattttcattgatgcagagccattataagaatcattctaatattataacgcatccgcaaatgattattatgtgaataatctcattttcacaaactgtttaaaatgcaaaaaataagcctgtcggtcgcgaatactcacaaccaacaggctcgttttcaaggttattatttgatttttgttttaatgtaagcaacggcatcagctaccgtaccgatcttttcagcttcttcatccggaatttcggcaccaaaagtgtcttctaattccaaaacaaattccacaatatcaattgaatcagcatccaagtcttccttgaagttcaattcgtctgttacctgatccttatttaactcaaatcgatcgccaataatagccgcaatcttatcaaagatttcttgttcattcataattaaaaacctccaaattgaaacccttacctacgtacttaacactttgggtatccagtgattatacataacttcgcaactcaattcaagtaaatcaaatcagacttgcgaagtatattgtagcgcctttggaacacattgtccacctattttaatcggtttcttttgggctattttgttggtcaaaataatcgattactttttgaatcgtttggttcgccagcattgcatgaatctggcgaacagtgtagtaaaccgtgcggccatctgcagcaccgtgcgccttaacaacaggggcttttaagcctaataaaacagccccgccataaacagatgtgtcgaatttatcacgaatcccaccaacactctttttcaagagtaaaccaccgattttttctttgacaccagcatctataatcgcatgtttgacttgcgacatcacgattgtggcagtcccttcaattgctttaagcgtcgcattgccggtaaacccatctgtgaccacgacatccgcaaccccttttaagagttcacttgcttcaacgttaccaatgaagtttaacgttagatcatctgccagtagttgatgtgctgccttatgcaactcatcacccttgccagcttcagtcccattattcaacaaaccaattcgcggcttttgaatgccacggacgtcttgtgcgtagaagttccccattaatccatattgatgcaaatgctccggctttgcttcggcgttggccccaacatctaacatattgaagcctaaatctgaattaatggctggtagggtaggcattaaacctggacgatcaatccctttaatccgaccaatcacgaataatccggctgctaagagcgcaccagtattccctagtgaaaagagtgcgtctgcttccccatctttaactgcctgcgccgccagaaccattgaagcttgctttttacgccgaatcgcacgcactggttcatcttcgctggtgattttttcggtggtatgcacaatcgttaaccgcgtcatatcatcaatcaacggtttaatttgtgcttcatcaccatacaacgtaaattcaacatctgttaattctgagcgggcttgtaacacaccttcaattactgattggggtgcaaaatcgccgcccattgcgtctactgcaattttcatcatcattcctctttccgttttcaatctaacgttaggtaattttgcttttgttgttgtaagtatgttttgagtggcgtatggttcggtgctgccaactcaggatcaagcgtgaagattttttgcacttcttgttgggcgacttgtaaactcgcaaagttggctactggatcgccaactttaaagacgggcaatccagattgacgatcaccaaagacttcccctggcccgcgcaattctaaatccttctgcgcaacgacgaatccatcagtggtttcagtcataatcgtcatccggtcaacaccttgttggttcttcggatcagccaccagaatacagtatgcctttttcttacctcggccaacccggccccgtaattgatgtaattgcgccaacccgaaccgatccgcatcaaaaatgagcatcaccgtcgcgtttggcacatcgacaccaacttcaacgacggttgttgaaaccagtaattgaattttgttctcagaaaaagcgttcataatctgatttttttcatcatcttttaactggccatgcaacaatgcaacatggtaatcaggttcaaattgttccaccaacgttgcgtaaatctcctcggcattctttaaatccatctgttcagattcggcaatcaacggtgtaatcgcaaagacttgcgaatcgtttgcaagttgtttacggacaaagctgagggcttgttcgacttgattactacgcacccaactggtttcaattggaatccgtccttttggcaattcatcaatcgttgaaacgtccatctcgccatacgcggtaatcgccagcgtccgcggaatcggggtcgccgtcattgcaagaatatcaggctgtaaccccttttcacgcaaaattcgccgttggttgaccccgaaacgatgttgttcatcaattacagcaaagcctaacttatgatagaccactgcatcttgaatcaaggcatgggtgccaataataatattgatgcgcccggattcaatgtctgccaacaacgtccgccgttctttagccgtcgtcgaaccggtcaataagccaacagtcacgttcattggtgccaataagcgttgcaagctttgatagtgttgttccgccagaatttccgttggcaccatcaatgcggcttgataacccgcagtcactgccgcgaacagcgcaatcgccgccacaatcgttttcccagaaccaacatccccttggagaaggcgattcatatgcgctggtgattttaaatcaagacaaatttcattcaccactcgcttttgtgcatcggttaaatcaaacggtaaggtttgaataaaatctttaagtgcttcattttggtactgcaaagctaaaccgtttgccacatgccgatcagtctgtttaatggcttgtaattgaatctgatataggaagaactcatgaaaaatagcgcttcggcgtgcttgctttgcttcaggatacgttttagggaaatgcatgccagcaattaagtcgcgttcgttcattaacttatagcgcgtgcgaatatcctctgggatcaattcgggaataacgtcttgatacaaatcaaaggcttcttgaatcatcttgaccagtgtcccttgacgcacacttttattaacggaatagatggccgcaaacgatggattctcagccgattgaaccgctaggaccttcatccccgtcaatgtatgacgtttagcatcccacttgccataaatagcgacatcgaccccggcttcaaacttgtccttaagatagggttgattaaaaaaagtaaccatcacaacgtcatgttcaatcaagagccgtacattcagccgggtcttccctggtccccaacgactgatgaccggatcagcgacgaccgttccttttaacgtcaccttttcctgatctgccgcttcggataaatccttgaccttcaaatcttcgtaacgaaacggaaaataatacaataaatcactaatggtccttatgccaagctgatcgagggctgtcagacgtttcgggccgacgccagctaacacagcaacagaatccgttaaacttaacattgacagcctcctgtaacgtgctttcaaaagcatcctgttgcgtttagcaccattagccaaacaagtagctacgctagtcattcggctaattaaactaatcctcacaggataagcacttttgatacacttctttttcttaacgtgctttttaaccatattccaaggttaaacgtacttctactaaaaaacgggaaccaggtatattcaacctcattcccgttttatttgattaactattcaactgaaatcaagtatgggtaaactggttgattcccttcgtgtacttcaacttctaattctgggtcttgggccataattgcatcactaatttgttcagcttctgttgcatcgccgtcttccccgataataattgtgacgatttcactgtcttcatcaagcattgtttggaccatttcaatggctgctgttaaacgttcagccgttgagaccttaatcttaccatcgataatccccatgtaatcgtctttcttaatttcaagtccatctaaagtcgtgtcccggattgattgcgttacttgaccactaatcacggtatctaacgcctctgtcattgcttcttgattagcagccaattcagcagatgggtcaaatgataagagagcggtcatcccttgagcaatcgtccgactttgcacgattgcaactggaatatcagccacttcggcagcttgttcagcggctaagaagatgttcttattatttggtaataagatcacttgtttagcattggctgctttaatcgcatctaaaatatcttgcgtacttggattcatggtttgaccaccacttaagatataagtagcccctaaactcttgaagagttcagcaatcccatcaccggccgcaatcgcgataatcccattttcaacaggttctgcttgcacaggggcagcagcttgttggtcgttttcaacaatcgtatcatgttgtaaacgcatgttatcgactttaatcttcactaatgaaccaaagtgttggccgtaagccatgactgtccctggatgttctgtatgcacatggaccttcaccacttcttcatcggctaccactaagagagagtcaccaacaccgtttaaatgattgcggaattcatcataatcaaattcgcgatcgacagttgtcccatcaccaagggcgaccatgatttcagtacaataaccattttcaatatcttctgtacccatttgagcggtttgatgatgattggcattgaccatttcatccatttccgcttcatcaggtgtgtaaagatcttttgcaggtgcttggcctgttaaaccttctaagaaaccttcatagatgaagaccaatccttgaccaccagaatcgacaacgccgacttcttttaagacagggagtaattcaggggtcttcaacaaggccttcttagaaccctcaacaacagcttcgataactgcaccgatatcatcagtttgaccggcaaccttggcaccagctttggcgccttttctggcaaccgtcaaaatcgtgccttcaacgggtttcattactgctttataagccgtttgaacaccatttgtgaatgcgtcagccaaatcttgtgcatccaacgtttctttttcagccatgctcttagaaaaaccacggaaaatttgtgaactgataaccccggagttaccccgagcgcccatcaaaagccccttggctaaactcttagataattcaccgacagattgcgcgttgttttcattaactgctttggccccactttgaaacgttaaactcatattggtcccagtatccccatcaggcactggaaagacgtttaatgaattgacaaattctgcatttttagtaagccgatgtgcagcaacccgcatcattgcttggaattctgctgctgtgatttcagtaactttcacgaatgttcctccttgaacaaaaacaaatagaactggacctagtggccagctccgctaattagttttagtcttctaatacccgtacaccttgaacataaatattcactgagttcgcaccgacacccaacattgtttcaagattgtacttcactttactctggacgttacggcaaacttcagagatcttaatgccgtaaccaacaataatatagacatcaatcgcaacgccattgtcttcttgacggactacgacaccccgattataattctcacgattcaaaatatcgtttaaattgtcacggatttgattcttacttgccatcccaacaattccgtagatatctgttgcagcaccaccaacgacggttgcaatcacgttattggtaatatcaatatcgccatattgtgttttaattttaacagccattaaaatagcctccttgtgccatacttattgttattttagcatagcggagaagagttgcaaagcaactggtgatgaattcttccccaaatgcggcttatttttggactctaatgagtttaaacgacttattttggactgtcaagtaaatttccttgaaagagctcttgcattccccaaactattatggtaaattatttaagtgaattgtataagccggtgtgcatgcatgcaactattaagactaactgaatcatattatgtttctcgttaattctaccggctttacttaaaggaggaataagaccatggcaaaagacgttattaccggccgtaaaacatcatttggcaacaagcgttcacacgctttgaacgcatctcgtcgttcttggaagccaaatttacaaaaagtacgtatcttagttgatggcaaacctaaacgtgtttgggtttcagcccgtgctttgaaatcaggcaaagtaactcgtgtataatttcaattgatagaccgccagttggcggtctatttttttggcaaagagtacgagataagtcggctaatcctcgggagatgactgatcgaacacgtttatggcaaccaaaaagacggctcggataaaataattttatccgagccgtctttttaatccttactttgaatcaccgcaaccaccccagtttcaaaactgaattggccggtctcaccgatgaactcattactagcccatgaaatcgggacttgcgtttggtaatccaccaagcgatatttttcatcaattaaatttaaaccagttgtgggaactaatggcacaaaggccagataccgtttatcggcttctttttgtaattgatacgtccctggtgcataaaagcgaatcgtattttgccgatcgcgcatctctaaccggtctaaaaacggcttaaaacgtgtttctaagggcataaagagattagcaagaaaatggtccaaccgaccgcctgttgcgccataaagcacaacttgatccgcattaaattcagttagcgcaattgataatgccaactgagtgtcggtatcatctttttctgcttgcacagagcgaatatcctttactgctgattgaacggtggtccgctcagccgccgtcaatgaatcaaaatcgccgactgacacgacaggtgttacgcctttttgcaataagcgccacgtaccacggtctgctgtcacccattgaccatcaatcatttctggctgcgccaattcgggggcccactcactgactggtcctcccaccaacacattaatccgcgtcatgagcagcctgctttaaagttgcaatccgggttgctaaatcaccggcaaacgtatatgaaccggcaacgaaaacatctgcgcctgctttggcacacgcaccgatggtttggtcgttaaccccaccatcgacttcaatcgtataatctgcatcagtatgttgatcgcgataagtcgctaattcagtgaccttatccaacatcgctggaataaacttctgcccaccaaaaccgggattaaccgtcattactaagacttgatcaaccaatgataagactggttcaatcgcactaactggtgtccctggattgatcaccacgcctgctttaacaccagcatctttaatcatctgaagaccacggtagagatgttgcgttgcttcggcatgaatcatgattaagtctgaaccagctgctgcaaattgttcgatgtagcgttctggttgttccaccattaaatggacatctaagcctaacgttgtcaatggccgcaagccagttactacttgggggccaaacgacatgttggggacaaacatcccatccatgatatccacatgtaatagatcagcgcccgccttttcaaggttttggacgtctctttgtaagttcataaagtctgcgcttaaaattgaaggtgcgatttgtttcatcatcaaaactccgatcacatttttattttgacttcttgtaaactggccgaatatcctttaattctgctctaaactgtaaataattcgtataacgactttgcataatttcgccactgtcgacagcttctttcacggcacatttcggttccatcacgtgttgacacgttctaaacttgcatccttgcccgatttctctgaactctgggaatcggtcaaccaaggtttcaatcgtgacgtttaataaaccaagtgatgaaaagccaggcgtatcaccaactaacccatcattcaacggaatcagttcaatatgccgggttgtatgtttcccacgatttaaactctgcgaaatttcggcagttgcaatattcaagctcgggtcaatgtggtttaacaacgttgacttaccggcccccgtttgtcctgtaaagacggttgttttatgcgggaacgtgtcttcaattgccgtaattatctccggtgtaaaggcggtccgcggtgcaaaaatttgatagccgatcttcgcgtaatacgccaagtaatcactaatttcttggtattgttgatcactaatcatatcggtcttggttaaataaactaacccttgcatgtgcagcgattcaatataaatcaagaagcgatccaacaaattcaaggagaatgctggttccaccgccgaaacaattacgacagcattatcaatattagcgactggtggtcgaatcatctcatttttacggtctaaaatctcaagaatatagccactttctgtttcactttcactctcgaattcgacaaaatcgccgacaagtggcgtaattttccgtttacggaaattaccacgcgcacgcgttcgataaattttgccttcactttgtacatcataaaacccactgagggcgcgaataatctgtcctgtctgcaataggtcacctcccaattagtttgtcacatggtcatcagatagaatctcttgaccatttcttaaaatccggaaacggccggcttggtccgctttaatcgtaaatggcaattcaacggttgtatctgcggtaatcgtcatttctttataaacactcattattgaatgcgtgctatcttctaaataaatcgtaatcttattcgtcgtagccgttgaagtactacttgaactagagctcgtactactactgtcacccgattcgctcgagctgcttgtactactttgtgaagttgctaaggaattatcaaacggaatcgtaatcgacttcgtaaaactcttggtagcgggcgcttttttacctttagaaagtaccacgttaatattggcaccttcttgaatagatgcaccactaccaggtgattggctaatgactaacccttcatcaatcgtattggagtaatcctctgaaaaagtaaccgtcaaaccaacgtcatcaacatagtcttgaacagcctgtttcgtgtaattactcaaattgcgtaaagtaatgcttggcttgccgctgctgacagtcaaggtaatcgtcgtcttacttgggacaactttttcacctgcggcaatgctttggtctaaaaccagtcccgaagcaacactgcgtgaactctgatatttgcgcacaaccgtcagtcccttttgtttcaataacgtgctgacatctgtgaacggtttgtccgtatagtcttcgatctcatactttttacgacccgtactgattgttagatcaaccgtactgcccgatttaacatgcattcctttaccaggcgtcgataaaatcacatgccctttgctgtacttattgctagtagttttttgaatcttaccaacttttaatttatctgcggttaatgctgcagtcgcgttttcttgcgtcatgtctgtcacatctggaacagtcacttcactgccttgcattgcgtacgcagcgaagaccccgagcatcactaacaagactacgccaagccccacaaaccaccatttccgcttcgacttcttatgcggctgtttctttttctgatcgtcttttacttcagtctcatctttgggtttggcttctggcgcatcgttttggcgcgtaatcccttctgggtcgagagccggaatcacctttgtttcacccatatcaccttgtgagggcacgaatttcggttcatgcgcccgactagctgataatgaggtactcaaatcagtggtcatttgcccaacatcactgtagcgttcgtccggatctttggcagttgcttttaacacaacgttttccaaagcttgtggaatccgcggatcataatctcgaacgggtggtacagcatcttgaaaatgtttaatcgcgatggaaacagccgattcaccttcaaatggcaccatacccgttaacatttcatacagaataatcccgagtgaatagatgtctgaacgtttcgttgccattgaaccccgtgcttgctctggtgataaataatgcactgatccgagtaatgtattggtctgggtcatcgcggtttcactgagcgcaatcgcaatcccaaaatcgctaatcttaacgttacctgcttcatcgaccaagatattctgtggtttcaaatcacgatgaataatatcgtgcgcgtgggcattttcgaccgctgataaaatctgcgtcataatatcgacgacgcgttgataaggaatcgggaagtgttcaacgatatacttctttaaatctgttcccttcacatattccatcacgatgtattgcatgctgttttcttcaccaacatcatagatactgacgatattggggtggttcaattcagttgtggcaagtgcttcgcgtttaaagcgacgtaccgtgttcggatcgttccgtaaatcaagtcgcagcaccttgaccgccacttggcgatccaaaatcagatcttgggccagataaacgttggccatgccaccttctccaattggacggataatctgatagcggccattgaccgcgtagcctgtctccatcatcgcgcaccctcctcaccagtttgatgtaagattaacgccgtaatattatctaagccaccggcatcatttgcttgttgaattaatgccgcacatttttcttccagcgatgtcggtgtcatcagcgtggtcttaatttgttcatcatcgaccatattggttagcccatctgtacataataatagataatcatctggttcaaattcgtaaattgttacatcggcatcgacatcttgcgaaacgcctaatgtgcgcgtaatgatgtttttttgcggatgatgctttgccgcttcttcggttaactccccttgtttcaccaattcatttaccaaggaatggtcctctgttaattggcggagttcgttattccggaagcgatacactcggctgtcgccaatattggcaactaagtaattggcacctgaaatcaacactgcgacgagcgtggtgcccatcccaaacaaatcatcatactgattagccttcgctaaaatatgtttgttttctttttgtaattcgaaaattaaccatttaaccatggattcaatgtcggtatcatcagttcgttcgaactcgtacccaatatgggaaaccgccatttctgaagcaacatcgccgcctaaatgaccgcccatcccatcagcaacaatcgcaaactgcgcaccgcttttattggtataaaagccgacatagtcctgattattttggcgttgttggccgacatcggtttgaaaagcaactttcataagaattcacctcaattaataatttaagcccgtcgtgttaaacaagcgatgaaaaagccgtctgtttgataatcatcgggatagatttggacaaacggtgtcgcttgattggctggcaatggtttgtcgagtgctactggtacgatttcaaattctggatgattggccacaaaagccgcaacaacttgttgattttcttctgggacaatcgtacaggtactgtaagtcaattgaccacccacttttaaggttggtgcaacggcttctaaaatcgccaattgaatcttttgaaggttcaataagtctgctgcttggcgacaatacttgatttccggtttacgtcgcattaagcctaagccagaacatggtgcatcgactaaaatcttatcaaatgtttcaggttcaaattgttcaccgactttgcgtgcatcgagcgcccgcgcatcaatgacgtctgcaacatgcaaacgcttagcgttttgctcaatcaagcggactttatgttcatgaatgtctaaggcagtaatttgccccccttgactggcatccaaataagtcgccatatgtgtcgttttcccacctggggctgcacaagcatccaagatccgatcacttggttgtagttgcaaacttggtgccactaacatcgagctttcatcttgaattatatacgcgccttgttcgaacaattcaccgctggctaagtgaccgccgtgggcaactaatccagcggctacaattacactcggtccaatcgttaacccgtcagcctgtaagtctgccaaaacggcatcaactgaattaacacgggtattgactcgaatggacgcattcgctggttggttaatcgttgccaataagtgttccaattttgattgccctaattcttggtggaacttcgccactaaccactgcggcatactgtaagtcacacttaggcgttcgattggatcggcaattgctgctaaatcaggcaatccagtccgttgttggttccgtagaattgcggtgaccaacttagccgtgccagcatggcccatttgtttggcaatctcagttgcttcataaaaaatcgcatgttcaggaacacgatccaaataaacctgttgaaaaactgccgtccgtaagacttggcggacccaagttgccagtttagctggtttttgaataaagggggctaggtaataatcgagtgtcatttcatgttgaatcacaccatacacgagctgcgttaaaaaaccagcatcttggggattcaagtggttttgtttaatcacttggtcgagggccaagtttgaataactgttttgtttggcaaccgccgttaaaatttcaacagctaaatagcgtggtgtctttttaggcatcttgcaccaccacttgttgtccgactgcgagttgtttgccaaccccgtttaagaaagattggaccggcattttagccttaccagctggttgaatctcggtaatcttcaaaacactgccattgccggctgctaattcgaaatcctttttgttgatagcgacaatcacaccggctggttgatccgtcgttgtttcagcaacagttgcttgccataattttgtccgttgaccattaattggcaaccaagcgcctggttgtggccgtaacgcacgaatctggttgaccagttgcgttgctggttgctcgatatctaattgttcttgttccttagtaatattgtaagcaaacgttacttgtgcttcatcttgtggtgtccggggcgcggtttgatcgataatgcttggtaatgtcttcaataatagatctcgaccgacataacttaacttatcaaataaagtcccggtgtcgtctgaagcttcaattggaatgctggcttgttcaatcatatcaccggcatccatttttttagccatatgcatgatggtaatcccaatttctgaatcgccgtttaacacagcatattgaatgggtgcaccaccacgatattttggcaagagtgaaccatgcacattgatggctgcaatcttagcggcttctaataacttcgttggcaagaattgaccatatgctgccgtcacaattaaatctggttgcaaggccatcacgtccgctaattcttgactaccactgagtttttcaggttgaaaaacagtcaggtttaagcgaacagccgcttctttaacgggtgtttgttgtaggacttgcttgcggccaactttccggtctggttgggtcacaacggctaggacttgataatcgtgtgccacaagggcttctaaaatcggtactgaaaattggggagtccccataaatacgatggatgtcattaatcaatcacgctcactttaagtaaattgtaggggttcattgtccaacccaatcttgaaaccatgacgggtatcaatttgggtcgtttcgagaatctcggcgagtttcgcctgaagttgtggttcctgtttatatttaatcacaatttgatagaaataacgattattaatccgcgcaatcgacttcggcgtcggacccagcacaatcgcttggtcggataagacgggccgtaattgacgggcaatctggaaactcttcttggctgccaacgcttcttcaggatggctaatcgttaactgtaccgtaaaataatacggcggatagccgccccgatggcggactgccatctcatattgatagaagccttcataatcatgttgcttggcaaattggatggcgtaattttccggattaaaagattgaacgataaccgcaccgattttatcggcacgaccagcacggccactgacttgcgtcaataattgaaacgtgcgctcacttgcccgaaaatcaggtaacccaagagcggtatcggcgttaatcacgccgacaagcgttacatcgggaaaatcaagccctttggcaatcatctgcgtgcctaataaaatatcggcatcgtggtcgccaaagcgtttgagtaatttagcgtgcgcaccttttttgcgggttgtatcaacgtccatgcgtagaatacgagcatttggaatcagctcttggagttctgcttcgactttttgtgttcccgttccaaaatagcgaatctggcgactctgacaatttggacaagtccgcggaattgcttcttcatgaccacagtaatggcacttcatcgagtgcgtatccatatgcaacgtgagtgagatatcacagttgggacactgcaagacaaagccacaatcgcgacacatgataaaggatgaaaaaccgcgccggttcaacaagaggacactttgttcgcctttttgcaaccgatccttcaacgcatctaatagtgcaggtgaaaagttgctgctggcttgttgcttcatcgcctcgcgcatatcaaccaactcaactgccggtaatggctgttgattaatccgttgcgtcaggcgcaagagttggtagacgcctttttgggcgcgggcacgcgattcaagcgacggtgttgcactcccgagaatcactgggcaatgatggtactgactccgccagatggcaacatcgcgggcatgatagcgcggactttcatcttgtttataggaagcttcatgttcttcatccatgataatcacaccgatattctccaatggtgcaaaaacggctgaccgcgccccaacgacaacgctggcttctttgcgttcaattcgccgccattcatcatacttttcaccttcggataagccactatgtaaaacggcaacttgatcaccaaagcgacccttcacgcgtttgaccatctgcggggtcaaagcaatttcagggactaacattaatgcagttttcccctgttgcaagaccgcatcaatcgtttgcaagtaaacttcggtcttaccgctgcccgtaatcccttcgactagaaaaacccgatcagattgggccttagtagccgccacaacggcttctaccgcatcagcctgttcatcagtcaacgccattttttgcgtcgtcgtgacggttttaggataaggatttcgataagcttcaactttaacttggcgtaaccaacctttgtcggcgcctgtcttgatattctcccgggtaaaagtcgtcttggtcaaaacatcctttaataagggattgggttgatcaattaaactttgtaaataactaatgagttgactctgcttttgcgctgacttacgtaagccggtccgcgcttcttctaactgttcaaacgataatgccggttcaatcgccgttaattgcttcacgcgggcgcgatcatcgacatggtagaccacttcgattttcccttggcgttgtaactgcatcaattgttttaacttttcgggatctagcgactggtcaaacgttaattcgtcgttaccattgaacaggcttgcttgtaaggctggatcaatttcatcaactagttgcgcggtcttagagtacttagcacgcatcacacttgggagcatcgtttgtaagcacgtaatctgaaaggcataggtccgctctgccaaccaacttgataattgaagtaattctgaattcacagccggttgtaaatcaatgaccgccgtaatcggctttaattgcccctcaaaattggcttgatcttgaatggacaagataaagccttgaattaatcgatcacctttgccaaaaggaaccgccacacgcatcccaggttgaatactgtctaataaagtatccggtacttggtaatcgtatggccgattagtttgcatcgtcggcacatcgacaatcacttttgcgatttgtggcatctgaatcctcctttttagttaagctaacaactcagcaactcgttctagaatttgagtcgcaatcacacttttatccgccaacgctaatgtttccggtactgcattcggttgtaaaagcgtaaccgcattttgatcaacaccaaagccccgatcatgctgactgacatcgttcgccacgagtaaatcaacatttttagctgctagtttggtttgggcatgttgtagtaaatcatctgtttctgccgcaaaaccgaccaagaattgatgcgtcttctgttgcccaagcgtcgccaaaatatctggggtgcggtctaaagttaactgcatctcagttgtgttcggttgttttttgattttgtgcgtgacatattgggccggtttaaaatcggcaaccgccgcagccatcaccacaacatcggccccttcaaagacactgctaactgtgccttgtaattgcgccgccgtttcaacgtaaattattttgtgcaaaccagccggcactggcaattctggacgcgtactgatgaggatcacattcgcccccatcgccacggctgcttgggccactgcataccccattttaccagaagatcggttgccaatgtagcgtaccggatcaattggttcttgtgtcccaccggcagtcaccaccacgttctgcccacttaaccgttgcggtccgaattgttgcgcaacttctgccataatcgcggtttcttcagggaaccgcccgacaccagcatagccttccgctaaaaagccggtatccggttccatgacagtatagccatctgctttaagttgggttaaattccgttgggtagctggattaaaccacatatgttcattcatcgccggcacaattaatttgggcgcggtagtggctaacaaggcggtcgagacaaagtcgtcagcaatcccattagcgagtttcccgattagattagcagtcgccggagcaatcaccgccagattagtccaatccgctaagtgaatatgggcaacccgatccggttggtcttgattaaacaaatcagttaacacgggtttacgcgttaatgtggcaaacgtcagtggcgtgacaaattcggttgccgcctgagtcattgccacttggacctcagcacctgctttaatcaatccacgcaccaaattagccactttgtagacggcaatgccacctgtcacataaactgcaattcgtttattcgttaaatccactttcaaaaccccctaaaactaaaaaaactgcactttaatttaaacatccatcgatgaataaactaaacatgcaggttctttaattattcttattcgctgtctttttgagcgagcttatccattttttcagcatctttttcaagcatcaatgaatcaggatcaataatgacattgccagcagcaatttcttccattgccatcccaaccgttttaggtgatttgtattcagataacatcttaatatcaccggcttcgatttcatgggcccgcttgctagctaaaacagccaatgagtaacgtgagttcacgttttctagtaacttatcaattgaaggatatacaatcatattattattcccctatcattttcttgtattggtcgatcacacgtggcactcgtaagtgttcactttcgataatcttttcgattcgttgaaccgcatttggaatttcgtcgttgacgacagcataatcgtaattttccatcatcttgatttcgtcggctgctttttgcatccgcttatcaatcgttgcttgatcgtctgtgccgcgtttttgaattcgattccgcaattctaataaatcgggtggtgtcaagaagatgaagacgccatcgggacacttctcgcgcacttgcattgcgccttggacttcgatttctaataaaacatcgcgccctgagtctagtgtctgattcacatacttcatcggtgtgccataataattatccacgtactgtgcatactctagcataccatcatttgcaatttcttgctcgaattcttctttgctcacaaaataatagtcaacaccatcttgttcgcctggtcttggctttctcgtcgtcatcgaaactgaatagtgaaaatcacgaaattcatcttctagcattgcttgacggacagttcctttaccgacccctgatgggcctgataaaacgatcaacattcctcgattggacatctacgtaattccctcttcttttataaaatagttaaagtctattctgcactatttggcgggaaatttcaagtctactttgtttccatctcatttaaaattaaccttaaggacgcaatttcgtcgtttgacagcgtcacacccttacccattttggcatgatccggtgcccaatctcgcaaatcaaattttggtgcacgttgattccaagagattaaattcaattctttacgccaaccagctggattttcactcaacacaccgatttctgccataatttcatattcaattttgcccatcaaatcaccctttctatcagttcatcctattatacacgaaaaaaatcaaaaaatgccgcttgcaattctgaacgtttgttcgtataatgaaaacacaaacaagtgttcggaggatgaaatcatggaatttaaacaagcaacggttagcggactcagtcaacaattggttaaacaatatcaccgcttttttgaacttacaccagaagcgactgcttttgttgaacaaccccaaatgcaacctgctcagattcaattatttatgacccaagcgtttgaacgccactaccatgttgcggtgcaattcaatgttaacgatcatctcgaacaagtgaccgggcgcttggttaaacaactcagtgcgaacaagtatctgctaaaagagagtcgttcgaacctctacaagattgtcctttgcaatcaaattcgttacattcaaaagaaaaattaagcaaaaaaataagggtgcagccaaaaaaatattttggctgcacccttattttaatgtcggcgactttgcttagccgtttccgctaatgccaccaattcttcggcatgttctaaagttaactctgttacttcagtccccgctaacatccgtgccagttcagcaatccgttgtttaccggttactttttgaacggacgtttctgttcgattttgtttcacttgtttttgaatttgatattgatgatcactcattgctgcgacttgcggcaaatgcgtaatgcagagcacttgcgaatgttggccaatttcactaatcttattggcaatcgcttgggccacacgcccactcactccggtatcaacttcatcaaagatgatgctagtaacgccttgtgattcggagaaaatcgttttaagggctaacatcaagcgcgataattccccaccagaagcaattttagcgagcggccgtagtttttcaccagggttgggttgaatgtaaaattcaactttgtccatcccggaagccatgaactgttcctgttcatttggcaagaattcaactttaaagaccgtcttttccatgtataacgcttttaactgttgatgaaccgctttttcaagttgcttagctgctttttggcgtaattgcgtcaacgtttgtccgtttgtcctaagttgttgttcaagttgcgtgaattgctgctccaactcacttgcgttcgcttcagttgcttgcatcgctgctagttcagccccgattttttcaccataagcgagaatttcggcaattgaatcaccatacttatgttccaaattattaatagtttctagccgttgttcgatttcatctaaccgtgcttcatcccattctaagtttgaaacttcccgactaatatcaatgctactatcttgcaacgtgtaataaccagtctgcagactgtccgcaatacgcttgaattctggatcgagttcagcaatttcttgcatctgattcattgcaactgcgatttggtctaacgcattcccgtcttctcctgctaaaatcgtgtgactggcttgcaatgcttggttaattttttgaaagttcattagtttggctcgttcttcgactaacttgctttcttcatcagcctgtaattgggctgcatcaatttcgttagtttgaaatttcagcatatccaagcgttgcgcccattcttgttcattttgctgtttttgcttcaaggcacgctgtgttttacgataggcagcataggtttcggcataggctgccttcgcggttgttaacttttgatgcgcaaattcatccaacaaccccaagtggcgatctggatacattaattcttggtgttcattttgaccgtgaatatcaactaaggtttctccaatatgcttcaaagtggttgtattgaccaaatgaccgttgacccgacaaacattgtgtccattaacggctaaatcgcgctgtaacaagacggtttgttcgtcgtgttcaatgccaaactggtctaatactgcggcggttgtgccattaggcgtcatcgtaaataagccttcaagggtcgcttttttagcaccagtccggataaagtcttgtgaaccccggccgccagcgagtaacccgactgcatcgataataattgacttaccggctccggtttcccccgagagcaccgtcatcccttcttcaaaactaattgctaactgatcgataattgcaaaatcgtgaatgaccaactcttgtaacatctgatcatccccctttcgtttctcttgatgctaaaaaaacttgccaaattactttagcaagtcttcaataaacttcgtagactgtttagcattttcttctgatttacaaatcaccaacacggtgtcgtcgccgccaattgtaccaaatacaccactgagctgcatttgatccaaaagattagcaattgccgtcccgttacccggtaaggctttaatcacgacaaaatagtcttgttggttatgcgtaatataggcgtcgcgtaaaatccggcgcaacttttctttaacgtctaatttcttttcaggcggtaggctatagtgatagccctcgtccgcatttggcactttaatgagctgcatttctttaatatcccgcgaaatcgtggcttgcgtaacatcgatgtcttccgcttgtaacagcttcacaaaatcctcttgtcgttcaatctcatgggtctggattaaattttttaacagtcgttgccgatctaccttgcgcattaaaacaccctcttcatgtgagaaattattctattcctcaatgatagcgcatttatacataaaatacaaagttttatacactattttcccgttggtcgtttcaaagcagcataggcattctctaaaaccgtatcaatattcatgtttggggccatcgttccagtctcagccgtcgtattccgtagatgaatcaagaattcaatattgccttcaccacctttaattggtgaaaaatctaaccctagcacgtcgtagcccgtcgctaaactaaaatcaacgatgtctttaaccaccatcttatgcactttcggatcacgcacaatcccgtgtttaccgacattttcagggccggcttcgaattgcggcttaattaaagcaaccgcttcgcagtccggtttcaagatgggtttcaacggcaccaaaatcttatgtaacgaaataaacgaaacatccgtcatggcaaaatctggttgaccattggtgaaatcttctggttgactgtaacgaaaattaacccgttccatcactacgacgcgtggatcttcgcgcaatttccatgctagttggttatagcccacatctagtgcgtaacagagtttggccccatttctaagcgccacatcagtaaagccccctgttgaagaaccgatatcaagtgcgattttatcctgtaaatcgatgttgaaaacctcgaccgctttcgccaattttaaagcccctcggccaacatacggaatcttacgccctttgacacttaagacagtttcagcgtcgattttttcgcccggtttgtcgattcgttcatcatttttaccgtacacttcaccagccatcacagaccgttttgcttgttctctggaatcaaataatccctgttggactaataatacgtctacccgttcttttttcatctgttctcctattcattaaaatagtttaaaaaactatttaatagtgctttatctaacccggataaatccgttaaagcagtttgcgcggcctgataagtctcatccaacgcgtcttttgcaccggctaagcccaataagcctgggaaagtattcttatgttcgtcagcatccttatggaccgccttgcccatcgcttctgtagtgcttgtcacgtctaaaatatcatcttggatctgaaatgccaacccataattttgcgcaaaaagctgtaaactagccatttgttcatcggataaatcagccaaaatcgcacctaagccgaccgcgcattcaatcaaacggcccgttttgagctgatggacttgtttcaattgaactaacgataaagttttagtttgtccttcgatatcttcaatctgaccagcaaccatgccacttggaccggctgcttgcgccaataatcgaacagcgcggctctgctgatcagtcgtcaaatcggtcgtcgttaaccattcaaatgcaagtgtcaataacccgtcgccggctagaatagcttgcgcctcgccaaaaaccttatggttcgtaggttgaccgcgccgtaagtcatcattatccatcgccggtaaatcatcatgaatcaatgagtagctatgaattaattccaatgcccccgctacgcgatacgccatttgattaatcggtcgccccgcacttgcaagcaccgcaaataccaaaagtggccggagacgtttcccgccagccatcactgaataggtcatcgctttttgcaaggttggttcttcaatctgagcaagttgctcagtcaaataggtttcaaatgcgggcacttgttggcgcgcaaacgttttgaaatcaaccattattcttgtgcctcagcatccaatgggacttcttcgccattatctgccatcactttggccatcgttttttcagccttacttaaggtttcttctaatgtttgacttaatttaacacccttttgaaaagcagtcatcgctttttcaagtggcacatcgcccgtttccagttcattcacaattgcttccaattgtgctaagttctcttcaaatgttaatttcttttctgccatcttattcgtctcctttatgagtggccgtgacacgcgcgttcacgaggccatcttggacatgtaactcgattgattggtcgaccgtaaaatcggtcatttttttcattacattttggttatcatccgttacataagcaaatccgcgtcccaaaattttcaacgggcttacgagatccaaggccgccaccgcttgtccagcctgttgccgccgattttggacaaggctctcgattgctcgtttcaaacgatgatcggtatcagtcaacattctttgtgcttgttgaatcgcaccacttggtgattgcgactgcaggcgttgctgcaagagttgtacattctgttgactagtctgtaagcgttgttgttgcgccaacaataaacgacggtgcaactgatcgacattttgtaaatagccgtcatacaagcgttgcggctgttttaagacgtaactgttctgtaagtggaccaattgctttttgtttaatgccaatgttttcgaaaatgcctgatataaccgcaaacgttgttgttgcaacttcaacacttcgtccgtcaaaaccggtgttgctaattcagctgctgctgttggtgtcgctgcccggacatccgccactaaatcagcaatagtcgtgtccgtttcatgaccaactgatgaaatcaccggaatctgactggcaacaatcgcgcgcgcaacgcgttcttcattaaacggccataaatcttcaatcgaaccaccaccacgaccaatgataattgtatcgaaatccccttgttgattaacttgattcagtcgatcgactaaaatatcagccgcaccgtcaccttgaaccaccgctgggaataagacgagttgggcaattggataccgacgttgcgtcgttgttataatatcgcgaataacagccccagaaggactcgtaatcaccgcaatccgttttggaaagcgcggcaatagttgctttggtgcatcaaacaagccttcagccgataatttagcttttagctgttcataggcttgatacaatgcaccaagaccatctggctccatccgttccacatagatctgatagtttccagttgcttcgtacaaggaaatccggcccacaacaagcactttcatcccctcttcaggagtgaacttaatcttttcaaaagcggacttgaacataatggcactgatcttagctttattatcttttaaactaaaatattgatgcgcattcggtcgtaagcggaagtttgaaatttcgccggttaaataaacccgatccaaatacggatcgcgttcaaatttagcctttaaatactgcgttaatgcggtgactgttaaatagtctgttggtttaaccacgtttagcacgttcctttgcaatctcaatcgtttgatccatgagcatcgtaatcgtcattggccccacgccacgcggaactggcgtcatcgcactaacatgtgatttaagggcttcaaaatcgacatcaccggtgactgttccatcttcaagccgattaatgccgacatcgacaacaaccgccccttctttgacatcctcaatgccgaagaagtgtggtttaccgatggccgccactaagatgtcggctgttttcgttagggcttttaagtctgccgttctgctgtgcgcaatcgtgaccgtggcattggcattgagcattaaagctgccaatggccgaccaacgatgttactccggccaacaatcacgacatttttgccagccacgtcaatatcgtgagctgccaataagcgcataatcccatttggcgtacaggccactaagcccggttgattaagccataatcgcccaatattgactgggctaaaaccatcaacgtctttttgtgggtcaatcgcccggataatatggtcttcattaatttgttttggtaatggtaattggactaaaatgccatcaacggtttcatccgtatttagttggcgaacaaccgctaataaatcagcttccgttgtttcagcagacaggcgttttaactcagatgccatgccaattttagtcgctcttttttgcttgctttgcgtataaatcgcacttgctggatcatcacccaccatgacgaccactaatttcggggttaccccttgttgtttgagtgttgccaccgccatttgttgtgcttgtgttaattcatttgcaagtgctcgaccatctagtaattccaaagttaacaacccctatttatcgatatttgatgtttctattttagcatagttaatcggttaattccgggttatcagctgataatgaccgtttaaattcaaaaaaacacgctaaaaaaatactttttaacgtgttttaagtgatttcgttcgtattttactaattaagcttcaacgaatttagataaaacgccgttgataaaaccttttgcttgatcatctgtaaattgtttagcaagttcgagcgcttcattcaacgccactttatcgggtgcttctgttgaattttgcatttcaaacaaccctaaacgcaagataattaaatccggtttggctaaccgtgatagttgccagcccttcttcaagtatggcgttaaagcggcgtctaattctgcttgatgttctgtgacgcccgttaccaagaaggcaaggtagtctggaacagcaacttcttcaacttcttcagcatcgaattgatccatggttaaaacggcttggtaagcatctgccaattctaatgtgtcattagcatttaacgcaaacaacacttgaaatgcagcttggcgaatttggtgtcggttaaaattaggcattaagattggtctccattttgatcaggtgtttcatcgttaaataagtcatctggatcaataatttttggtgctttttcagtgacaacgcccaccacgtgtacgttgacttctgctagttctaaatcagtcatgaacaataattgttctttaagggcttcttgcatcgcaagggcaaccttcggcacagaaacaccatagttcagataaacataaacatccgcattcactttgccatcaatcaccttaagagttacccctttaccgtgattcgaacgaccaaacaattcgttaatggatgatgataacgtcccccgcatttggtggaccccatcaatcttgcttgctgcaatccctaaaatcacttccacaacttcaggtgccatttgaatcttgcccaatgcattttcttgtgtatcaagtacaatatttgtttcttctgccatcgaaacccctcctaacaagttcttgctaatttagcctatgcccgtgagatgtaactcccatcagatgtgttaatcgttaacaaatcaccttcgttaacgaaaaacggtacttggaccactaagccagtttcaagtgttgctggtttagtaccacccgaagatgtatcaccacgaacaccaggttctgttgcagccactgctaaatcaaccgtgtttggtaattcaacccctaaggtttcactaccatacatcatgatagaaacttgcatattttctttcaagtatttcaattcatcattgatttgtgctgctggtaattctaattgttcgtaagtttcagtatccatgaagacgtggttgtcaccatctgcataaagatattgcattgattttgtatcaatgattgctttttcaactttttcagttgaacggaatgtcttttcttgattggcacccgttcttaaattcttaagttttgagcggacaaaagcgccacccttacctggtttaacatgttggaattcaacaatccgccataggttgttgtcaaattcaatggtcaagccatttttaaaatcatttactgataacattgtttatcctccaagcattatataagtatgccattgtcctaatcatagcaagaaatcaggctcaaaagcaagtatttctagccttttatccctaaaagtagctataaaaaaagggaccggcacccgccaatcccttttagcgtattcaatcgagcaaaagtcgatctgaacactcacttttagattgtcaatggtttgttgcctgagtaattagtataccagtaaaactggatttacacaaacagagtgtgacatcagtctgggatatctcgaggattaacccagagtcgcaaaagattgtggagcaatcatttgtgactctgggttaaccggagagatatgactgatggaacacgtttagaatgtgacgacagccccgcttctctcgcacaaaaaaaacacccacacaaagtgggtgtttaaaaaattatttagcttctgcagcgtatacagaaacctttttcttgtttttaccgaggcgttcgaaacgaacgacaccttcgataagagcaaataatgtgtcatcgccaccgcgaccaacattttcacctggatgaatctttgtaccgcgttgacggtaaagaattgaaccagctgttacagtttggccatcagcacgtttagaacctaaacgacgacctgcagagttacggccgttagttgttgaaccgccacccttatggtgagagaagaattgtaaattcatttgtaacatctaaatgcacctcctgtttattaactgtctatttacgttttgtttgtacttgaatgtactgcccgtattgttgcgtaatatcttcaagcgtcaactgcaaattctgcaagagaatctgagctgtcgctaaagcttggcccgaaaccgttgccggaatctgacaagttaacaaaccaccattcaggttatctgcttctacctctggttcaaaaccagcaagcttttgcaaactgttgattgtcccgattgagacagcagaaacagctgcacagacgatatcactcccgtaaggacccgagtcggcatgacccgtaatttgaaaagaaataattttcgaatcggcattgaccgtaaagtcagcttgaatcatcttatttccctcaattaggcgttgatagcgtcgatcatcactttagtatatggttgacgatgacccttcttttgatgactgtgtttcttaggtttgtatttgaaagtaacaactttcttttcgcgcccttgtttttcaacagtaccatcaacagtaacaccatcaatgtttggtgtaccaaccttagttgtttcaccaccaactaaaataacttgatcaaaagttactttttcgccagcttctgcggctaacttttcaacgtagattgcttgaccagcttctaccttatattgtttgccacctgttttgataattgcgtacatgtgtgcacctcctattttttcttagactcgccaactaaggtgactaatcatagtacttaatgccttagtatgcgcggttgcagctgtggagctcacaattacaacgttcatattatatcgaatatcacagggcgagtcaatgctttattacgcctcgacaaaaaattgtgcgacatcgaacgtcgtattaggtgtttgtaccaattggtataacatcttagccatgtagcgtggtgaatacacaagcccgtcattgacccacttaaagaccaacgctaaactggcccccgctaaataatcaatcgtaatactcatctcaatttgatcagcctgtgaagtctgattatagcgcttagccacgtaatcctgcattaattggcgcattgattcagtcagttgtgcctgaaagtgaagcgtcgcctcatttttatagaacactttaaaagcagcttgttgttgttcaacatattcaaaaagtgcctgtaaactgacctgacgatatgtctgatcgaccactacagtcacttgctgataaaaatcggccaccaaatcggccaccgcggttcggatgaaatccactttatcttcataatggagataaaaggtcccgcgagtaattgccgcttgcttggtgattgcttgaatcgaaatcccctttggcgtactgtctttcagcaagataatgagggcttgacgtaattgttgctttgttcgttgaacacgtggatcttgcgctcgtaaatctgtctcacgaaccatctgatagttcccccaatcttttaattaaattcacctgtcgatagtatagccgctcagtgaaaagtctgtccattaatcggcttgataacggcccttgatcagttgaatatcccctagtgtacactgtaaatttgaagattctgttaacgaacacccaaaaagtaaactttatcccccacaaatttaattgttgttcgtctgcggttatagtaaaatgagcgtagtatttcaaatcggatagcgttaggtggtcgtcactttgatttctgcattcttcattattttcatttcaatcgttttattcgccgtcattgctagtcaattgactttcaaaatcggcttaatcacaaattgcgtgctctttatcattttagttggtgttgatgcttatctattcagctggggtagtggttctcactgggtgtacgttattgtcagcctactcggattagtcgctagcgaattattattagctgaactcccccatcttaaataattaggttaacgtcaaaaagcggtccaactcatcattgagttgaaccgctttttttagtgcccctgccaaggactctcagtataccatattaatcaagtaaggttgtttctttcacttcatcaattgtcttggtaccagccaactgcatggtaatcgataattcatggtttaagtgttcaaaaacagattgtaccccttgggcgccacctaaatttaaaccataaataattggccgaccaatggccactaaatcagccccacttgcgagtgctttaaagacatgttcaccacggcgaataccactatcaaaaacgattgggacgcgttttgcgacttgttgcgcaattaaaggcaacacttcaaatgaagcaggcccgccatctaattgacgcccaccgtgatttgaaacccagatgccatctgcaccagcttgaatggcaatttcagcatccactggtgattgaatgcctttaacaaagactggcaaatttgtgatttgtttaatcttttgaatatcttctggtactaatccttgtttagcggcagcataaatttcagagatgcccttcccagcaccgtcagaattactataagctgctaaattaggcattggtagtgggaattggaattgcgtctcgatgtccgcttcacgataaccacccaatgttgaatcgacggtgagaataatggcttttacacctgccttaacggcttttttcaataagaactcattgaattgatcatctttactcatatagagttggaaaaattggggggcatcaggagccgctgcggctgcatcttccaccaatgtattggcataggtactaattgagaaaatcgaaccagccgctgcgacccctttagcagtgtcgacttcccctttttcatgtgctaacccttgggctgctgagggggcttgaataatcggcgtttttaaatcaatatcccataatttagtatgtaaatcagcatgatcgatgccttttaacacacggggcattatttttttagtattgaaagcactggtattttcagccatcgtccattcgtcttcagcaccgccacggatatagccaaacgcgccagcttccattcgttctttcacgcgtccttctaacgacgctaagtttaaaatatcgattggattttccgcttcacttgtatgatatcccatgatagattccttctttcaataattgaatacctttatcatggttctcttatcaaaagtaagcaaacatttatactcggttatttcacttgcgttcgaaatccaatgtcttgccggtaaaaagtcgtcggtaaagcgagttgcgctaaatcccgatagacctgttgactagctcggcctagcgtctcagcagaataactagcggtatacaaacgcccgccagcgctgaccaattgattggcttgttctgcgacactagcgaaactaaatgtgctgttgcgttttgcaaattgttgcaaagtgggtaaaacaaacggcgttgtcaattgtgtcgggtaaccatctgaagccaccacaacacctaacgtaatgcctgataattgccactgtaacgttggggtttcccccttcaataattgtgcaaaaacttgggcccagtcgcccgtcatccgtggtagcaccacttgtgtttcaggatcaccaaagcgcacattaaactcaatcactttcaccccgtgttgtgtggcaattaagcccgcatacaagacaccggtaaaaggcgtttgacgttcagccatcgttgccacaatcggttctaaaatagtcgttaccgcttctgcaacgcattggtcactaatctggggtactggacaataagcgcccatcccacctgtattaggcccacgatccccgtcaaaggcgcgcttatgatcttgagcaaccggtaatggatagacgcgattattcgccaccaacgccatcagcgagaactcttcaccttcgagataatcttctatcaataactggggcacgccctgttcaaagaacgcctgaacagtttgccgcgcgctcacgtcattttgagcgatgacgacgcccttgccagccgctaaaccatccgctttaatcacaacgggataacgaacgtcatcgagggcatccagtgccgcttggacagtctgataggcttgataagccgccgttggcacatgcgcggccgccataatttctttggcgaaagttttagacccttccaatgccgcagctgctttacgcggtccaaagatcgctaatccagcgtcttgaaaagcatccactacgccagccactaacggttgttcaggcccaacaatcgtataggcgacctttttggcctgcgcaaaggcaatcatcgctgcaaagtcagtcatctcaatcgcaactgtttgaatcccatccaattgcatccccggattgcccggcaaacaatagaccgttgcaacagttgaactctgctgtagcgcacgcgcaatcgtgtgttcacgcgcgccgctaccgattactaatagatccatgatttgcctcctattggctagtgtttgaaatgacggcgaccagtcgtcaccatactgattcctttttggttggccatgtcgattgaatcttgatccttaatcgaaccaccaggttgaataacagctgtcacaccatgttctgcggcgtattcaacgctgtcatccattgggaaaaaggcgtcagatgctaagacgaacggtgcttttaatccattggcttccgcttgttcgattgcaatcttcacagagcccacccgattcatttgccccgcaccaatgccgagggtttggtcctttgttgcgaccacgatggcattactcttaacgtgtttaaccacacgttgggcaaataacatcgcagcttgttcatcagccgttggtgttttgtccgtcacaaccttcaattcagatgcttgatcagtcacccgatcacgttcttgcacgagtaagccgcctaaaacagaaaccatttcgaagcgatccgcttgcttagcagcctcaaaatcaagcgtcatgacgcgtaaattcttcttcttttctaaaatggctaacgcttctggggtgtagcttggtgcgataataatttctaagaataaactgtgtaattcttcggctgtttgaacatccacttcacgattcaaggcaatgatccccccgaaaatcgataccggatcggccgcgtaggctttttgccaagcttcatagatggttgcacccaagccgacgccacacggattcatatgtttcatcgcaaccacacaaggttcgctgaattctgcgaccactttaaccgccgcatccgcatctttaatgttgttatacgataattctttcccgtgtaattgtaccgctgaggcaatcgagaaagccgttggtaaactgctttgatagaacgctgctttttgatgggcattttccccatagcgcaacgcttgtttaaagtcgtatgaacgtgttaatttttcagggaattcgatgccgactgcttcggttaaataaccggcaattaagctatcataagctgccgtgtggcggaatgccttggctgctaaataacgacggtaatcaactgcagcttgcccctcatcgacgacgtgttcgaggacttgcgcgtaatcttgttgatcaacgaccacgtacactgatttgaagtttttagcggcagaacgcaacattgaaggtccgccaatatcaatttgttctacagcttgcgcttcagtaatccctggtttttgaattgtttctttaaaaggatacagattgacacaaactaaatcgattgtctggatgtcatgggctgctaaagcggccatgtgtgttggttcgtcgcgtttggcaagcaagccaccatgaatattgggatgaagtgttttaacccgtccatccaacatttctgggaaatgagtgacttcatcaatcgcaattactggtacttgcgcttcttgtaataccttgaatgtcccgcctgttgagatcacctcgtaaccagctgctattaatcctttagcaaattcaataattcctgttttatctgaaacactgaccaacgctcttttcattgattgaattactccttctattttggtttttaattaattcagcaacaacttgcggataaatcgcgtgctctgtatcgtgcacgcgttgttccaatgcggctaaactatcgccaggcaacaatggtacttttgcttggacaatcatcggaccgctatcgacaccttcatcgatgtagtgaatcgtaacgcccgtttcagccacttgtgccgcataggcccgttcaatacttcgtaacccagaaaaggccggtagtaacgatggatgaatattgataatccgttgtgggtaggcatgcaacaatactggggtaatcacccgcatataacctgctagcaatatataatccaactgtaacggtgccaacagcgcgacaattgctgcttcatagtgttgtcgatcatcataatcacttaagcggatgaccgtcaccggtacatttcgttggcgcgctttttcaatcaccggtgcgcccggctggtcacacactaaattcataatctccatgcccgctttttttaaggcgtcatcatctgcaagtacttcaaagttagaacccgttccagaagcaaaaatcgccactttcatctcatcaacccaccaattctattgcattttcttgtcgcggtttaaccgacccaattcggtaagcctgttcttgttcagcgttcaattgggcgaggacttgtgccgctttttctggtgcgacggctaagaccatcccgatccccatgttaaaaatgttatacatctcgagtgcatccaattgcccatattgtttaagtgccgcaaaaatcggtaagcttggccatgttcccaattgaatttcggccatcacgttgtcaggcaacatccgcggtatattttcaataaagcctccaccagtaatgtgggccgcgcccttaataaagccttgttcgataaacggctgacatgcttgtgtataaatccgcgttggtgttaatagccattcaccgagtgtctgaccaggcaattcgggtaagtgactgtcgacggacaacccatgttgttcgaagaaaatttggcgcacaagtgagtagccattcgaatgaatcccactggacgcgattccgattaatacatcccctgtttgaatcgtttcaccagtaattaattgagcttgatcagcaattccgactgcaaaacccgctaaatcatagtgtttttcagcatacatacccggcatctcggccgtttcaccaccgattaacagcatgtcagcagcttggcagcctgcaacaacgccgctgacaatttgttcgatcttatccggctgcgtttgaccagccgctaagtaatctaagaaataaagtggcttagcgccttgggcaacaatgtcattgacacacatcgcgacacaatcaatcccgatggtcgcgtgtgcatcagctgcaaaagcaaccatcaacttggtcccgaccccatcggtacttgaaacgagcaccggattttcatactgccccatcgctaaggcaaactgaccaccgaagcgaccaatattttgattggttgcgccgacctgcttttgaatccgacgaaccacttcgtaaccggctgtcacatccaccccggctttttgataagcgtttgtcatgattattactccttatctgcttttaaacttgcctggtaggcagcttcataatcgtaaagtggcgttggataatcaccgttgaaatacgccatacataacccggaatacggcgcatcttgttgtaacccaatcgcgtcgatgagcccttgttcgcttaaaaagccaagcgaatccgccccaatcgtagcgcacatctcgtcaatgctttgatgcgcggcaatcagttcatcacgtgtttgaatatcaatcccataaaaacaagggtacttcaatggtggggacgcaatccgcaaatgcacggataatgcgcccgcttctttcaaacgtttcacgatgtgcttgctggtcgtcccacgcacaatcgagtcatccactaaaacgattcgtttaccagccacaacacttttaaccacggcgagtttgcggtttaccccttgttcacgaagggcttgcgttggttcaatgaacgtccgccccacgtattgatttttaacgaggcccatttcatacggcaaaccactttcctcggcatagccactagcggccgataacgatgaattcggcaccccaattaccatatccgcatcaactgcggtttcgcgtgctaactgtttccccattcgtttgcgggccgcatggacgttaatcccacagatatcagaatccgggcgagcaaagtagatatattccattgaacagattgaatgcgtggtttcggttgtgaagaagtcagaatgtaacccgtccgcatcaatcgtcacaatttcgcctggctgcacatctcggataaaagttgcttgaacggtattgagcgcacaggtttcactggccacaacgtagcccccgtttgctaaacgtccaatcgagagtggtcgaaagccgttgggatcaagcatcgcaatcaatgaatcttgcgttaataataggtaggcaaagcccccacgaatttgttgaagggccgtcttaatttgcgcgtgcaaatcaggcccttctgcacgtcgaatcagatgcatcagaatttcagaatcagagctcgattttaagatggcccccgattgttcaagcatgcggcgcagtgtgaccgcgttggttaaattaccattgtgtgcaagtgcgaattgatcggttgcaaaatcgaataggaacggctgaatattttctaaaccgtgactaccagcggtcgcataacggacatgaccgattgccgcgtccccggttagttgggttaagtgctccggtttgcggaaaacatccgccaacaaaccgcgattgcgataacccattaagtgcccgtgatcattagtgacaatgccggcaccttcttgcccacgatgttgcaaactatgcaagccaaaataagtcatttggtttgcttctggactaccccaaatcccaaaaacaccacattcttcatttaaactttttatttcatttgacatggtatcgccgtctcccaacttaacttcgcttcagtcaccgataactcaacagttgattcagtcgtttgcacttgcataattggcgtggccgagaccgtcccaattaattgcgcctgatcttgacagaacgcttcaaacgccgtctgattttctggccgaaccgtgatgataaagcgggattgcgtttcaacaaataactgttgttgattaagggggacttgcacgcggcagccgagttgttctttaaaagtcatttcggctaacgcaaccgcaaaaccaccctctgataaatcatgtgcgctagtcacccagcccttttgaatcgctgctaagacgcaatcttgactcgctttttcagtggctaacgaaaagccgcttaatcgtcctgcaactttgcccgtcaacatattttggagttccgaacccgctaaattcgtatccgtctggccaacgaggtagattaaatcccccgctgacttaaaatcttgcgtcgtgatgtcggctgtatctcgaatcaaaccgaccatcccaatcatcggtgttggataaatcgcttcgccattgaattcgttataaaaagaaacattaccagagatgaccggcgtatcgaaaacctcgcaggccgccgcaatcccttgggcactttgatcaaattcccagaatacctctggcttttccggattgccatagttcaaacaatccgtaattcccagtggttggccccctgccgcaacgatattccgtgctgcttcggcaactgccacttgcccaccgacttttggatcgaggtataagtaacgcccgttacaatccgtcgtcatcgcgagcgcttttttagtcccacgaattcggacgaccgccgcatcgcttcctggtaaaacgacggtattggtcttcacttgtgcatcatagtggctgtatagcgagcgtttgtcagcaatcgtggattggcccaataaatcgagccatgttcgtttaacatcattaatcaccgactgataaggcgccatcgctttaaattcagcgatgcgtgctggttcagtttgtgctttatgataaatcggcgcatcactcgttaaagccgccactggcaaatcggccactaattgcccaccatgccacaattgatattgttgactctcagtcacttcaccaatccggaccgcatccagatcatatcgttcaaacaaggcaaccacatctgtttcatgaccagctttaacacaaagcgccatccgttcttgcgattcagaaagcatgatttcataagcggacatctctgtttctcgttgtggcacaagatcaagattgagaatcatcccagtacctgccttttcagccatttccgctgttgaagaaactaagcccgccgcacccatatcctggatgccgactagccaatctggatgcttcaaaattaattccaaacaagcatccattaatagtttttccataaacggatcacccacttggactgctgagcgttgggtcgccttgccatctgcaaattcatccgatgcaaaagtggccccgtgaatcccatcgcggccggttttagccccgacgtagaacacactattgccagcaccacgcgctttaccttgctgaatatccttttggtcgatgacaccaacgcacattgcgttgacgagtggattagtctgataacatggatcaaatccgatttcaccaccgaccgttggaatcccgatacaattaccgtacccgccgattccagccacaacttcttgaacaaggtatttcgtgtggtcatccgtcaattcaccaaagcgcagactgttcaaaagcgcaatcggcgtcgcgcccatcgaaaaaatatcccgaataataccgccgacaccggtggccgccccttcatagggttcgactgctgagggatggttatggctttcagctttaaagaccactgcttgaccatcgccaatatccaaaatcccagcgccttcacctgggccttgcaacacgtgctgaccacttgttggaaattttttcaaaaccggcttcgaatttttatatgagcaatgttcactccacatcactgaaaataacccggtctccgtataattcggcaaccgttttagaattttagtacgaatcaattcatattcatcatctgataacccccattgctgataaagcttggtggcttggatttctgccggtgttggttgctttaacacggttattgccctccttttcgaatcgatgtgattaatgctgcaaataaacgttgcccatcatcgctacctaataaggtttcgactgcgcgttctggatggggcatcatccctaagacattgccggcttcattcgtaacgcccgcaatattcgctaaactaccattcacatcattttgataagtaaatgcaatttggtggttcacttttaaccgttccagggtctctgcatcgcaataataattcccttcaccatgagcaatcggcaaccgaatttgttcgttcggcatatagtgttgggtgaacatcgtaccggcattggtcacgttcaacgcgactgtgtcacagataaaatgggtttgtcgattcggcaaaagaacgcctggtaataacccgagttccgttaaaatttggaacccgttgcaaataccgataaccggtttgccagcagccgcaaacgccttaactgccgtcataatcggtgccaacttggcaatcgcaccactgcgtaaataatcgccgtatgaaaagcccccgggcactaatacggcatcaaaacctgccaagctagttgctgtgtacgggacatactcagcgttttcatgacaaacatcttcaattgcatgatataaatcagcgtcacaattggaacctgggaaaactaatacggcaaatttcattgattcgtcgccaccttttgtatgtcgtagtggtattgttccatattaggattggctaagagttgatcacagatttgtgcgacctttttttcaactgcggcttggtcatcgccagccacttgcatttcaaaggacttgccaatgcgcatgccgctcacaccatcaaagccaagtcgttcgatagctttttggacagcctggccttgtggatctagcaccgaatctttataagtcacttgcacacgcacattaaacatctgtagaaccccctaaaattttttctaatcgtcgtaatacgacatcgtacaccgatactaaatcccctttgttcaagcggaaaacatccttatctagcgattcatgcgtcgtttgatcccacagacggcagttatctggggaaaattcatccgccaaaatcaagcgaccgtcataccggccaaattccaacttaaagtcgattaaatcgatatccgcacggtcgaataaatcgattagcagctggttgatctgcttagtttgtttttcaatcacttcaatttccgccggtgtcacaattccaagcgcggtggcttgcgaaatattgatggctggatcatctagtgcatcatttttgtaatagtattcgataatcggcgtggccaatcgtttgcccggtgcttgaccaaacttgcgggcaaaactccctgccaccacgttgcgcaatactacttctaggggcacaatcgtcactttcttgacgagctgttcagttgctgaaatattctcgattaaatgcgtttcaataccatttgccatcaagtatttgaaaattaatttcgaaatctgataattcaataatccttttcccgtaatctgttccttgcgtttgccatttaacgccgttgcttggtccttatagaccattctcaacacattttgatcgtcagttgtaaaaacatctttcgcttttccagaataaaacaacgtctcactcatgcttgaatccctccaaataacatatattttatttaaaattaaaataatcgttcgtgttacattagggtgtaaaaaaactttgaaataacctcatttcaaagttttcatcattattcgcccaaaccaacgcggtcaaagatttctgcgacgcggcgaatatggtaatggtaatcaaacgcgtcgtctaaatcagcgggcgtcaacacattcataatccggtcatccgcttctaataacggtctgaaatcagtttgttgatcccaagcttgggccgttttaggttgaatcaagtcataagccgcttctctcgaaagcccatgatcgattaacttcaaaagaacccgttggctgtaaatcaacccgaaagtccgccccatattacgcttcatattttctgggaagactgtcaagtccgtcataattttggtgaaccgtcgaagcatataatccaacaaaatcgtagtatccggtaagatgatgcgttcggcagaactatgcgaaatatcacgttcatgccagagtgcaacgtcttcatacgccgttaccatgtgtccgcgaatcacgcgtgccaagcccgtaatattttcagaaccaatcggattccgtttatggggcattgctgatgagcctttttggcctttcgcgaaaaattcttcgacctcgcgggtttcagatttttggagaccccgaatttcagtcgcaaacttctcgattgaagttgctagtaacgccatttcagccacgtaggcagcatgcaagtcccgtggtaagacttgtgttgagatttcttgggcgcgaattcctaaatggtcgcacacataggcttcgacaaacggtggaatattggcaaacgtgcccaccgccccactaattttaccggcttcaacgccttttgcagcttcttcaaaatgtgccttatgtcgttttaattccgaataccatagtgctagcttcaacccaaacgtcgttggttcagcgtgaacaccatgcgtccggcccatcatgaccgtatcttggtaacgtttggcttgtttggcaatcaccgccaatagcgcatcgatatcggcccgcaaaatggtgttggcttgtttcaacaaataaccatacgccgtatccaccacatcggtcgatgttaaaccatagtggacccacttgcgttcatctccaagtgattcagaaactgctctggtgaaggcgacaacatcgtgccgcgtttcctgttcgatttctaagatccgtggaattgagaacatcgcattggcacgaattttcgcaacatcttcagccggaatgtgtccgagttctgaccaagcctcatccgctaaaatttcaactgccagccatgcctcatatttattctggtccgtccaaatcgcacccatttcaggatttgtataccgttcaatcatttattagcgtcccctctagtcccaaattttagtctttttaattgccgttaacgtttcatcaacagccggcgttaataacgtgacgtggcccatcttgcggttgaccttttgaaccactttgccatagtcgtgataatgccaatctgctgactgccgactggctgttagcgctgcttgccagtgctgcccaagaatattgaccattaccgctgattgccacaattgtggtatttggagtggccagttgcagacgccccgaatgtgggttgcaaattgagaaaagtcacacgcttcaatcgttagatgacctgaattatgcggccgcggtgcaatctcattaacgtagagttgcccgtcatggccgacaaaaaactcgacacctaacgtgccgactaattcaatctgcgtggcaatttttgccgcaaccgattccgcttgtgccgctaacgccgctgaaatgcgcgccgggcagatgctgatatgtaaaatgttatctcggtgttgattctcgattgcgggaaaaacggcttgttgcccggctgaattctgactaattatgaccgaaatttcttgatcaaaatggaccatcgcttctaatacacaaacactagcggttaacaactgttgagccacctccatatccattgcggaccgtagaatgacttgtcctttaccatcatatccaccgcgcgtggtcttcaagatacaaggaaaaccaacttttttaacagctggtattaattctgcaggggtcgttacaatctcaaaggtggcatgtggtagctgttggtcaacaagaaattgtttctccaacaatcggtcttgagcaatccgtagcgccttcgtcccttgaggaatccatgtatattctcgggcagcttcaatcgtcttagcatcgacgttttcaaattcatatgtcaacacatcgacacgttgcgctaacatcataatttgtgcctgatcatcataagctgccacaatttgatcatccgcgacttgtccggctggacagtctgcctgcggatctaagataatcactgcaaaccccatctctttagccgctaatgtcatcatctgacctaactgaccgcccccaacaatcccaatcgtttgccctggtaaaatttggttagtcaaagtctgcattacttgccaccgcctttgcatgcatccgtgcttgatactgttgcagtgccacttgataagctgggacctgcaagccacaaatctgtgtcgctaaaataccagcgttaacggcccccgctttaccaatcgcaaccgtcgccactggtacgccacctggcatttgcacaattgataataaagaatccagcccactaagtgccttactttgaattggcacgccaatgactggtaagactgtattggcagcaatcatccccggcaaatgtgcggcaccacccgcaccagcaataatcgcacgatacccgttcgcctgtgcttcttttgaaaaggcgaacatttcatccggcatccgatgagcagaaataatctgtttcgtataactcacgcccaactccgataatacagaagcggtctgttccattgttccccaatctgatatagagcccataacaagtgccacatcactcatattctttgcccactttctcgttgttgattatgctttgattctaacaatcttcatctgatatgtcaaaacattttacgaactattttacataaatatatttaataattcgtatttaaatcataaatacacaaaaaaaacgattaacctgttggttaatcgtttttttatcgttatggcaatacaacgaagagtaatgcacctaaaatcccaccgatgattggaccgacaactgggatccagctgtatgaccagtctgaatcacccttgttggcaatcggcaagactgcatgggcaatccgtgggcctaaatctcgagccgggttaatcgcgtaaccagtcgtcccaccaagtgatagaccgattgctgtgataaccaccccaaccactaatgggttcaaaccggctgttaattcaccacgtgttaatgctagtaaagcgaagattaagacgaatgtcccaatcaattcactcattaaattggcaaatgggctgcgaatcgcagggccagttgcaaaagtgcctaagattgctgcttgatctttagtagcttgccaatgtggatagtattgaatccaaacgacaactgcgcctaagaacgccccaatcatttgggcgataatgaatggtaccaccgctgcccaaggggtcttgccaatcattgcaaaagcaatcgtcaccgctgggttcaagtgtgcaggtcccataaatgcagaggtatatacccctaaagtaaccgcaaagccccaaccaagcgtgatagcaacccagccagcaccgttggcttttgtttttgctaagctaacgcccgctacaacgccatcccctaaaagaacaaggataaacgtcccaacaagttcaccaagcgcctgaaccattattgaatgttccatgagatttcctccaagttaagtcctattttaaatagtctaattgtgcttcagcaattgctgaatccaataattctgtttgacgtgctttttcagcgtcatcccagttcaataaacgcgccatttcatcaacaactggttgtttgatggctgctaattgatcattgtggaataagatgaagtttgtccgtcttaaaagataatcaactggtgttaatgtcatttcttcgttaactgagtatcttaagctgattgtttctttcaagttcaagccttcagcagcaccttggtccgcgtatgaaacaacccggctgacgtttgaaccgaagcggtttgctaaatcaatcgcatcttcttcatcaatccctttgttcatcgcaacttttgcatagaatttaagggtatcatccacgttatttggatcgaagtgcccacctgaaacttgtaatttcttagaatcgatttcacgaactgtttcattgaaatctttcttcaagatatcccggattaattcaagcgcaccggctgccatcttacgataatcagtaatcttaccacctgataaagtgattaagccgttttcagccactttcaaatcactaccacgagaaacttgtgatgggttgactgattcttcagcatgcgccgttcttaattgactgattgctttttcaacatctgcacgagcagctgttttgttttcgtaatcatcaactgtcttgattaagttgttgaatgattcttctgaaaccttaccgctattagcgccaccaccgttataatcggagctaccgttattagaaattaatggtcgtaaacctgcccagctagcttcaatatcgtttaaagcgatattaacgctaggatagcgattgttgattgcttttaagaggtaatcaacgtctgcttgttcaacacgtgggtgtttgaaatcgcctgtgtaatcagtatcagttgtcccgaagtacgtcttaccttcgcgtggcacaacgaaaatcatccgaccatcatgtaagcctgaatcgaagtaagttggttgtggcactgataaacgactactatcaacaactaaatgaatccctttagtaggacgaagtgtttcttgtgctttgacttccgtgtttaaagcatttactttatccacccaagggccagcagtattaatgactaatttggcatgaatatcgaatgtttcatccgttaattcatcgtgtgctttcaaaccgtttacgcgaccgtttgcatcataagtcattccgactgctttaacgtgacttgcgattgatgcacctaattcgtcagcttctttaatattttcgatgactaagcgcgcatcattattgacgaaatctaaataaacaccagcacccatcaaacggtctgacttcaagccaggttcgcgttggagtacttctttacgatcaattgtatagttggcatattgtgtaccagttacccctgccaatttatcgtataaatccatggcaatcttgacactgaacatgtcgtaagttgcttcaggttcatcatagattggtaaaagcattggtgtaggccgtgggatgtgaggtgcaatcccttgaacaacggcccgttcactaacagtatctgcaacaaccccaacgtcgaaagtctttaaataacggataccaccgtgaactaacttcgttgaacgtgatgaagtcccctcagcaaaatcttgcatttcaatcaaaccggttttgatgcctgatgcagccgcttgaatagcaaccccagcaccagtgatcccgccaccgattactaataaatcaagttgttcgttctttaagttattaattacttgttgacgtccttctaatgaaaatgtcattataatcctcctcattcacgcattttatatggtcgatgtttgaaaacctttgttgcttcaactgcttgttgccaaccagcatagagatcttcccgttcttcttcaggcatttctggttcgaaacgttgcccaactgagaaaatatgcgccaattcgtctgtatcttgccagaaaccaactgctaaaccagccaaaaatgcagcccccattgcagttgtttctaaattagctgccttttcaatcgagctattcaaaatatctgcttggaattgcattaaatagttgttgtttgcagcaccaccatcaacgcggagcactttgatatcaatgccagtatctttttgcatggtttgaacgacatcccgagtttgataagctaatgattgcagtgttgccttaataacgtcttgtcggttcgtcccacgcgtaatccctagaattgaaccacgtgcttctgagtcccagtatggtgcacccaaacctgtaaaggcaggcacaacataaacttcatttaaactggttgaagccttagcggctgcttctgaatctgatgatttttcaaccagttgcatactatcacgcaaccattgaatggctgaaccagcaacgaagactgagccttcaagtgcatagttgactttaccattgattgaataaccaattgtcgttagcaagttgttttctgacattgttggtttttcgccagtattcatcacaataaatgaacctgtcccataggtgttcttaaccatccctggttggagagctaattgaccaaataatgcggcttgttgatcccctgccatccctgaaattggtaccgtgctaccatagaaatgataaggtgctgtttcaccataaatttcagagtttgaccgaacatcaggtaacatggcccgtggaatgtttaaaatcttgaggatttcgtcgtcccaatccaaatcgtgaatgttaaacaacattgtccgacttgcatttgtatagtcggtaacgtgtgaagcgccacctgttaacttccatgtaatccaagtatcgatggttccaaagaggagttcgcccttttcggctcgttcttgtgcacctggcacttgatctaaaatccaacgaatcttagtcgctgagaagtaagcatcaattaatagccccgtcttttgatggaataattcttcatgcccatctttcttcaattgttcggcaatgtcatttgtttgtcttgattgccaaacaaccgcattataaattggtaaaccagtttccttatcccaaataatagttgtttcacgttgattagtaatcccaatccccgcgatttgatggggttgaatccccgatgatataaaagcgtttgcaatcgtcgataaaacagcgttccaaatttcgtttgcattatgttctacccagcccggttcggggaagtactgggggaattcacgctgtgcatcggcgactttttgaccattgtgatcaaaaatgattgaacgagtactggttgttccctcatcaatcgccaaaatgtatttttcagtcatcttaatcctcctttaacaacaatgttaggaaaacgtttcctcgaaaactattatagattaccgatgtccaaaaagaaagcgttttacccaaattaaattttacacaatttaacatccttaccaattcggcatttgtagcacatccaaaattaaaaaacgggtcaataatctcagatcaacactaattaaagtccttcatctgaatcattaaacccgtttttttacttaaatcattggctactaagtgggtaaaaaaaaccgttaaccaaccattagcaccctaaaaaaacctaggtcagacaaataatagttgtctgacctaggcttttaaagtgataatttaatcgtttgcgccacagtcttaggaataccgagtgcttcgagttccgccactgaagcttctttgatatgtttcatcgaaccaaaattcttcaagagtttcgtccgcgtcttaggaccaacccccttgatgtcatcgagtttagaactcaacgaattcttcccgcgtaattggcggtggaaactgatggcaaagcgatgcacttcgtcttgaattcgcgttaacaagtagaagccttggctctttggatccaactgaatggtttgatcaacttccccatataacaacgaggcggttttgtgatgattatccttgaccatccctgcaacgggaattgatagccctaattcgttctctaagacgtctttagccgcattgagctccacaattccaccatccattaaaatcaaatcaggcagtggtttatcctctttgagcaatcgcgaataccgccggaaaatgacttcccgcgtattggcatcttcgttggcgcctgcacgatctgtcgtttgcgttaacttatacttgcgatagagtttcttctcggcacgaccatcaacaaacgtgaccatcgctgagacaggatcagtcccttgaatatgcgaatgatcaaatgcttcaatgacgtggccatgtggtaagccaagcgcgtccataatctcatcttgcgccccaacggtcttgcggttgtcgagttccaataaacggaacttctcttccaacacaagccgactatttttctgcgccatttccatcaaagcttttttctcaccacgttgcggcgtgcgaatcggcacattcaaaatttcggtgaggactttcttttcgaccccttctggaaccagaatttcgcggggtaacacattattcttgcggttgtaccattgtaaaataaaggttgccaattcttcttcaggtgtgctgacacacgggaagagccgcttttcacgccgaatcaaccgtgcttggcggatgaagaagatttgaatcgataaccagcccttatccaaataaaaggcaaataaatcgcgcggggtattatcgttagaaataattttctgcttttcaacggtggcttcaatgtagtggagttgatcgcgcaattctgcggcgcgttcaaactgcatctcttcagcagccgtagtcatcttggccgtcagttcttttttaaccggatcaacttgcccattcaagaaacgtttaatctccttgatttgggccgcatagacactctcaggcacttctttgaaacacgcgcccaaacattgacccatatgataatacaaacagggccgcccttgatgtccctgacagcgtcgtaaaggataaacccgttgtaagaatcgcaatgtttcttgggcggcatacacgtccggataagggccaaaataaaagccgccatcttttttgacatcccccgtgatcagtaggcgcggatcgcgttcattcgtaattttaatgtaggggtagcctgtgccccgcttaagtttaatattaaagtaaggttggtgtttctggattaacgtaatttccaacaaaaaggcctctttatttgtcgatgtgatgattgtttcaaaatcgacaatttcagagaccaatttggccgtttttccttcgtgactactcttgaaatacgagcgcacgcggtttttaagattttttgctttacccacatagataatcttggcattgatatccttcatgatataacaaccaggtaatgcgggtaagagtgctaatttatgttcaatgtgttcgcttgccaaaaacaccactcctttaattcaaaacaagtgttcgtctttctattttacgtgtttttggctaaattgcaactattgtgctaggaccttggctaaaaattgttgcgtccgttcttcttgcggatggtcaaaaatggcttcggggtcccctttttcaacaatttgactatctgccatgaaccagacttcatccgccacttcgcgcgcaaaccccatttcgtgggtgacaacaaccattgtcatcccttcttgtgctaagtcttgcattaccttgaggacttcgccgaccatttctggatcgagcgcagatgtcggttcatcaaataacaatacgtcgggtgacatcgctaatgcccgcgcaattgcaatccgttgtttctgcccaccagagagttgatcactataagcatccgccttatccgctaaaccaacgcgttcaagcaacgcttttgctttagccgttgtttcggccgctgattctttcttcactttttgtggcgccaacattaagttatcgaggacagttaaattggggaaaaggttaaagttttggaaaaccatccccatctttgtccgaatctgatcaagctgtttttcagataacgtcatcaaatcggtgccttcaaacagaatttggccactcgttgggtcctctaaacggttcaagcaccgcaataacgtactcttacccccaccggaagggccgatgacaacaatcacttgaccagcttggacttcaccactaacaccatttaacacgaggttgtccccatattttttaaccaattgattaatcttaagcatgttgcatcttcctttccacatagttcaaaagtttcgagagactaaaggtcatgataaagtagatcaccatcgcaacaaaaatcggtgcaacgcctttataagttgctgattgaaccactttgagttgataaattaaatcagtgaccccgataatggaaacgattgaactttccttgattaaagaaatgaattcgttccctaaagcaggccagatattcttcagggcttgtggtaaaacaatgtaacgcattgtatcgcgttgtgacaagcctaaacttcttgaagcttcagtttgcccagcatcgatcgcattgatccctgaacggataatttcagcaacatacgccgcactatttaaggaaacggcaattacccctgccaaaagtgctggaatgttgacccataagccaatcccgaagtagacaaacatgatttgaatcatcaacggtgtgccccgaacaaattcgatatacatgactgccagcgcacgcaccaacttattcttggccaaacgcccaaaggctaggaggaccccaattaaaatcccaattgcaattgaaacaatcgtaatgaataatgtgtagccaatccctttagcgaagtatgcccaatagtgccacatgctagtgttgtgcgtattgaccttcatgagttggcccgcgttctttaagtattgcggaattaatttttgctttttaatttgcccgatactcttattagcagcagcgactaaggttggcgaatcctttggaaaggcaatcgctgatccttgcatgtctgcgcctaaatcaaatttcccattaatctgaacgagttctggatcattacttgcataggcggttgcgactggttcttccgccacaatcccgtcgattttatgactctttaatgcaaggacgagatctgggactttggccaagcccgtaatctgcgcatctttaatttgctttttagcgagtgtttgttggagactccccgtttggacccccatttttttcccgttaaaactatttttggagtggtaaatcttcgcatcagctttattgactaagattgattgaccaccgagataataaacatcagaaaaatcaacactcttgcttcgttcatccgttggtgacatcgccgaaataaccatatcgactttaccggtttccaaaccaaccaataacgcatcaaagtccatcgacttcaccactaacttaacgcctaaatcatcagctagcttctgtgcgacttgaatatccataccgacaatcttgttcttaccgtttttattcactaaaaattcataaggtgcataatcggggctggtccccaaaaccaacgtttttttagcttgcacttggctaaccgtctgtccagctgccaaaacgggctgctgctgaatcatgaaaaacgttaacattaccatgaatggtaacccaacaaaagtgagtaattttttaatcgtcatattatctcctcctctgattaggactatcatacaacaaattaaataattatgcaatatttatttataaaaagtgaatcattggcgaaaccgttattatctggtatgatagatgcaaattagaaaagagggattacgatgggcttaaaagtcactaacaagaccgatttaaccggtttattcgataaattcgcatcactaccagaagaacgccaaaaagttgaagcacaagttgaagaaacagctgataaattaaaaaaggtagatgcagaacaaaaagaaaagcattaaacaaagacagcaaaaaaggcggtaagacaaattcatttttgtcttaccgcctttttgctggtttaaacgtgcgtcatttgcaatcgcctttcggttaacgcgattgtacgctttattctgcgtgtctttctgggtagcgttgttttaattgttcaatgttttcgcgcgcgactttatcaaagtcgaggttattccattccgcaatttgtgataaataccaaagcacatcgccgattttcttagacatcattttttcatctagttcgtggccttggaacgcatattttttaacgatatcaaccacttcaccactttcacttgctaagcccaaagctaagttagttaacacttgttcgttaccatataacgttcggttggctaacttttgatagtcattaaattccattatgcttgtccccctattgcacattgcttttcaatccattcccaaactgtctctttaccagcaccagtcagtgcgctaaagcagacaaattgatcgactggattaaaatcaagcgcttctttgatgattttttcttgacgattccatttccccgttgagatcttatccatcttagtagcaaccactaaaacagggatatcataatacttcgcaaaaacgtacatcgcgatatcatcatcggttggttcgtgacggccgtcaattaatgaaataagcccctttagatttgagcggctggttaaataagcctcgataatttgcccaaacttctcacgttgcttctttgaaactttggcatacccataaccagggacatcgacaaagtaaagttcgttttcaacgcggtaaaagtttaaagtctgtgtcttacctggcttgctagatgtccgggcataactcttacgattgattaatttattaatcaatgaagacttaccgacattcgagcgaccagataacgcaatttcaggtaattgatcagttgggtactgcgaagcagctaccgcactcatcaccatttcaacatcatgtacttccataataacctccgattatttccttcgaatgttagtttagcataaataaataattattgcgccgttgacatctctctagtttcatggttaacatatcttcttaaccccgttaaatcgcgtcattgtaccgtttcaaaagtcccttaatgcaaaaaaactgccgcgacaaaatctaatttgtcccggcagtcttttaatttttatgacgcttcttgtccgtcagctaaaaagagttgtgggttggctgtgccatccaccgcttctttcgttacaacaactttagccacgtcttcacgacttggaatatcaaacatcatatccatcatgacttcttcaatgatcgaacgtaaaccacgggcccccgtgtttcgttcaatcgctagatgtgcaatcgcatggagtgcttctggtgtaaattctaattcaacattatccaaggccatcaacttgctgtattgcttaacgagcgcgttcttaggttcagttaaaatatgcaccaaatcatcttcagtcagtttttccaatgcagcggtaatcggaatccgaccaatgaattcaggaataatcccaaatttcattaaatcttccgttacaatttgttgcattaagctttgatcttcattggtagtttgaccattcttgcttccaaaaccaattgtcttttcacctaagcggtttttaacaatcgtttcgatgccgtcaaaggcgccaccaatgatgaataaaatattggtcgtatcaatttggattaactcttgttgtggatgcttgcgaccgccttgaggtggcacactagcaatcgttccttcaagaatcttcaagagggcttgttggaccccttcaccagagacatcacgcgtgatcgagacgttttcactcttcttggcaatcttgtcgatttcatcgatgtaaatgatcccgcgttcagcacgatcaacatcgaagtctgcattttgcaacagcttcaagaggatattttcaacatcttcacccacgtaacccgcttcagttaaagtcgtggcatctgcaatcgcaaatggcacatttaaaatccgcgctaaggtttgcgcaaggaatgtcttcccggaaccagttggtccaattaacgcaatattactcttttgtaattcagtatcgccttcttcggccactgacatttggttgacccgcttgtaatggttgtagactgcgacagataaagcttttttcgcttctgtttgaccaatcacataatcatttaaaatggctaaaatttcttttggctttggcacttctagtaaatcactgaaggcctcatctttaaactcttcatcaataatctctttgcaaaggtcgatacattcgttacagatataaacaccagggccagccacgatctttttcacttgatcttgcgacttcccacaaaacgaacacgttacgggtccgttagttgtttctgtatcatctagcatactgggattctcccctttctcgatatacgcttaccgctgtgagtcgttaaaatacacccctacaacgtaattcagactatagcataactatggtctagaataaagtaaagttactcgcacaccgtcaatgacacaaaagcgggtccaaagtaaacaccttgaacccgctttttagcatcatttaaagcttggattgatcagacgaccttatttagcgtctttcacttctacagctgaatcagcaatgatttcgattgctttcttaacaccgatatcatgttttaacatgtcatctgataagacgctacgaacagcagcttcttccatattgtattgttcagctaaactcttaagttctgcagcaacttcttcgtctgttgcttcgatgttttcagcttccacaacggcttcaagtacaagacttgtcttaacgcgtttgtcagcatcaccagcgaattgtttcttcaaatcatcttcagttgtaccagtgatttgatagtacatttccgggttgataccttgttgttgcatgttacctaagtattgttgtaattgactgttgatttcttcgtcaatcattgcttgaggtaattcagcgattgttgcattttcagttgctttagcaacggctgtatcttggatagcagcatctgcagcatcatttttttgttgttttaattcttcacgaattttttcttttaattcgtctaatgtatcaacactttcgtcgatatctttagcaaattcgtcatctaattcaggtaattccttagctttcacttcatggattgttaccttgaagatggcttctttaccagctaattcttctgcttggtaatcttcagggaaggttactttaacatcaacgttgtcgtctgctttgtgaccgactaattgatcttcgaaacctggaatgaatgaatttgagccaagttctaatgaatagttgtctgcttgaccaccatcaaaaggtacgccatctacagaaccagcataatcgatgacaacagtatcgcccttttcagcagctgcgtcttcttttaataccaattcagcttgacgttcgcgacggttttcaatttcttgatcaacgtctttgattgtaatgcgacggctttgttttggtacttctaagcctttatagtcgcctaaagttacttctggtttaacggtgacttgagcagtaatcacccaaggttcgcctttttccattttttcaacattaatttgtggttgatcaactggttgaatagcagcttctttaacagcagcatcataagcttctggtaagattgcatttaaagcatcttcataaagggcttcttcaccatacatcttgttaaagatttggcgaggcattttacctttacggaaacctggtgtgttgatatttttacgtacacgtttgaacgcaacgtccaaaccttcactaattttatttaaatcaatttcaaaggttagttcaccatcattggtgccctttttttcccattttgctgacataatttccctccgacagttatattcacaatctatcaattgcatacttaatcagcataaactatttaacctaaattgtaaatatttattggtctaaaaagcgataaaatccgatattttagtcgtttcaggccaacttttatcgaatttaatgcacaaaaaaactcgcagtttttacactacgagtttttcgattcaactaggttgaatattagtcgataatttcactaacgacaccggcaccaacagtacggccaccttcacgaacagtgaacttaagacctttttcaatagcaactggtgagattaattcaacagtaaatgttacgttatcaccaggcataaccatttctacaccttctggtaattcgataacacctgtaacatcagttgtatggaagaagaattgaggacgatagtttgagaagaatggtgtatgacgaccaccttcatccttgctcaagatataaacttcacccttgaagttcttgtgagtttggattgaacctggtttagctaaaacttggccacgttcgatgctatcgcggtcgataccacgtaataaagcaccaacgttatcgccggcttgaccttgatccaatgtcttacggaacatttccaaaccagtaacagttgtcttagcaacttcgtctttcaaaccaacgatttcaacttcgtcaccgacagtaacttggccacgatcgatacgacctgaagcaacagtaccacgaccagtgatcgtaaatacgtcttcaacaggcatcaagaatggtttgtctgtgtcacgttctggagttgggatatactcgtcaacagtagccattaattcttcaacagctttaacgtcgtcagcattgccgttcaatgcaccaagtgctgaaccgcggataactggaatatcgtcaccagggaaatcgtattctgataataattcacgaacttccatttcaactaagtccgttaattcgtcatcatcaactaaatcagtcttgtttaagaagacgatgatgtagtcaacaccaacttggtgagcaagtaagatatgttcacgtgtttgtggcatagggccatcagttgcggcaacaactaagatagcaccgtccatttgagcagcaccagtgatcatgttcttaacgtaatcagcatgtcctggggcgtcaatatgtgcataatgacggttttctgtttcgtattcaacgtgggctgtattgatagtgataccacgttctctttcttctggagcagcatcgatgtttgcatagtcttgagcttcagccaagcctttgtctgccaacatctttgtgattgctgctgttaaagttgttttcccatgatcaacatgtccgatagtaccgatgttaacgtggggttttgttctttcgtaatgtgctttttctgccattaaaacgaacctcctgtattttcgcaagaaaaaatcagtgtttagatttactaaactgataatcctttacataatattataatacttcaagcgctaaaatcaaagtgtttttttacacttgaagaattcaaaaatgattatatctgctatgagcgcgtttgtaaacacttaatgctcaaaaaaagtcagttttgaaacgatatttaggtgttttctactctaaaaatcaagtttccctgtcatttcttgcaactttttcacccagtcctgtatcttttctgaaataaccactgacgcggtataatccggacccagtaactgtttgagccatgcttgcgcccactccgtaggattatacatgatttcagcttcaaaaggatataaatatgcaaatcccatctcaacatccaccatcacttgtgctaacaaagtcggatcttcagtggctaactgctcatttaacgccgctaacaccgcattaaacgtcggactctcctccatcaattggatatcggcaggtacaaaagtttttgtctgttcaaaccattgcatcgtgactaattgttcaatattcagctggacgagcgtttcaatgacagtcgtcttcacgaaagcatgactgtaaggattcgttaaaatgggcgcaatactggtgacataaacattacgtggtaattgttcagcttgcgtcaacattgctagctgttcagctaatgggtgcgcagtgaggttatagaggccctctgcttgcttttgaatcgctgcttggtgattcgcttggtattctaattccgcagccgtaatcatcattctaagcgtcttaatgacttgcggggcaatcgtcgcatggcgtaatgcctcccacacttgatttgccgtaataaaacggtggttattcagtaataatgcaagataaaaccgcactaaatctgtttgttgtaagtagtccgcttgttgttcttcgacgattgtcaatgctgtttgcggatcaccagcttcaatcagcgcactggcccacaataaattcgccgacaacgtctgttctagttgatacgcagcttcaaaatggtcgcatgcttgctgccaattttgttgatttaacgctactttccccatccgtatcagccgatcatactgatctggaaattgcgtaatgtcacccattcaatcacttccttttgacaattaataaaacaatagcgcctagaatcaactgacctgatccagacgctattgtttctaaatgttattcagcggctttttcagcctttggtttattatcttttctttgacgacgatgattttgattaatttccataatcactggtagaatcactggccgacgtttcgtttgttcatacaagtaatgacttaagttttcccggacatcttgtttcaaatgactccagtcaaattctttgttgtccagattattttgcaccgcatttttgataatttcggcactctcagccattaaatctttgctagtcttcacgtaaacaaaaccacgtgcggtgactttcggttccgcgataatcttcttattcttgcggtcaatcgtaacaacagcgataaaaatcccgtcttctgataataatttccgatcgcgtaaaacgatattcccgatatcgccgacaccgctaccgtcaatcatgacgtcagttgcgtcaacttgtccgccaacatgcatcttccctttttcgtaagcgacaatatcgcctttaccaacgatgaaaatatctttgtaatccattcctgtttcatgagcaatatcagcgtgtgctgctagttgccggtattcgccttgaacaggcattaagaattttggttgcattaaattcaacattaattgcaagtcattcttattggcatggcctgaagcatgtaaatcatcgccaaccgccttaacttcgccacccgcacgataaatcatatctttggtcttcgctaaaatcgtttccatcgcgtgtgaaggagatgtcgttaaataaaccaagtcgccttcttcgatgtgaattaaacgatgatgactagttgccatcttttgaagcgccttgattggttcgcccatccgacctgtttctaagatcactgtttgttctggtgcaagtgtgcttaaatctttaggttggaccaagatatcgtcatctggcaaaataatcatcgataatttcattgctgtccggacgattttttctaaatcacgacccgttaaaaccactttacggcctgttttataagccgcatcaatgacttgttgaatccgcataatatttgaagccactgaagccacaatgatccgacccgtttgatacttgaacgtttctaagatggattcagcaatatcgcgttcgttagccgttgcaaatggtgattccgcattagcagaatcactcaagagtgctaaaacaccttgtttgccaatttcagctaagcgtgcataatccgtttgatacattggcattgctgattgatcaaacttaaagtccccagtataaacgacttgtccttcatccgtcttaacgacaatccctaatgaacctggaattgtatgcgttgtcttgaagaatgaaacggttgcgcgttcaaaatcgattgctgtattcgcatcgatgacgtggaagttttggaacttacgtaattttggttcgctgctaaccgtaattttagctaaagcaatcgttaattcagacccaaagactggtacatcatgttcctttaagaaataaggaagcgctccaatcgcatcagcatgaccatgtgttaggaaaatcccagcaacacggtctgcattttcttctaaataggtcatatcaggaataacgatatcgatccccaataattcagtttctggatatttcaacccacaatctaatacataaatttcgtcgtccacttcaacaatgttcaaattcttaccgttttcacgaacaccgccaagtggcataatcttaatgttactcattctttcacctctagcacttgaggaatttattccccaaactattttgtttgttttagtcgttcattcgtttaaaactcatccgccttaaagtctaactcatattttatcacaatttaaacaaactaacagcttttgattactaaaagccttttgagcacaaaaaaagcgggtccgcataacggacccgctttttgaaaatgaattaacgacgtaagccaaggctcttgattaattcacggtaacgttgaacatcgctttcacgtaggtaacgtaataagttacgacggtgaccgatcttcttcatttgaccaacatatgaatggtgatctttcttgtgaacagataaatgttcgtttaatgagttgatttctgcagtcaatacagcgatttgtacttctgctgaacctgtgtcgccttcgtgacgagcaaattggttaatgatttcgttctttttttcttgtgaaatagccatgctaatttccacccttctggtataatagcctagaacaacgtaaagcgtcgggtgaacgtcgctaaacagagtagtaggcctgtgcaataagcacttttcaagtttactaaatattagcgtcaaaagcaaggcacagtttcaaactatttaagcagtcaagttgaaatactttacaagtttttattgcaatcactctcactattttggtataataacgactgttgaaattaaaaatcttttttataaagatagtgaaacccatcggaggtgaacaacatgccacaaattaaatctgctatgaaacgtgtgaaaacaattgaaaaagctaaccaacgtaacgcttctcaattaagcacaatgcgttcagcaatcaaaaagttcaaagctgctaaaacagcaggcaacgaagaagctgcagacctattgaaagctgctacacgcgcaatcgatatggcctcaacaaaaggcttaatccatgccaacaaagctggccgtgacaagtcacgcttaaacaaaatgatggctaaataatttaaccacaaaaaagcccccacaaccatttggtttgtgggggctttttttgctttaagcaacatcatctgtcgcaaattgtaacataaacagttcaaacaataaggttgcttcaccttgcccagtctttattttttcttcaatgccctctaaacctagataggcttgggcaagcgtcgccttagaaaagtgccgaatttgttgcaatgctaatttgatgcggtatgggtgaatttttaagacgctcgccaaattaccttggctataccctttttcaaaaagaattttcacttggagtaacaagcgaaattggcccaacaagatggcgttaattttcagcggttcttctttttgtagcaataaatcgtgatacatctctaaaaccggaccgacctttttttgtaaaactaacggcaccaattcaaaaacattatcttcaatactacttgccactaatgcactaacggccgtttcagtaatcacccggctttgttgcgcgtaaagcagtaatttgggtaactcagccataatctgactgtaatcaccattagtcttgcttaacaataacgtcattgccgctggttcaatcgtgacttgttcactttgcagttgcgctgtcactaactgctggacctggcgctcattaatcttttgaacgtcaatgacagttgccatcttcttcagttgtttaacaatcttcttgcgttcatccaacttcgcgtatggcgcgaagataacgagtgccgttgtcggttgtggctgttctaaataagcttggaatccttttaaatcatgatcaagtttagttttaactttttcacctgttaagaagaatggattctgcataaaaacaattcgtcgctcaccgaaaaagggggccgattccgcatcttctaatgcccgcgccacctccgtctggacgagatcataactcgcaaagttcatcgtcatttcttctgtcgaaagcgttgctttaaataacgctctaacctcttcaatcagcgctgactcttgtcctaatacgagatacaccggtgcaaacgttcctcgattcagtgctgtttttagttgttctgtcttcatttagtcacaatcctttagtgttgttttaatcattggcacttggccaaaaccatagcgccattccagcatcccacagtcagccgtattccaaaatgggacgttcgcacgttttaaagtctgcaacgttgcggcatgtggatgaccataacgattatggcgtcccgcagaaatcaacgccccttttacctgccacgtcgcaattgactggggatcactcgccgtttgactgccatggtgacccacctttaggtaatcaacgcgtaattgtgggtagcgatcaacgattgccacttcacccgctttttctaaatcaccagtaaataaccaactcgcaccaccaatttgcgtttgcaaaacgagtgagtcagcattcccgcctggtccggccaccactggcgctaacacattgatttgttggtgaccaatcataaaatgttggtccgccaaataaggctcaattgcaacttttgtaagatgcggccgcacttgccgttgaaactgccggttttgcggtaagcccgcagcacaaatcaaccgtttaactcggatatgttgcataatttcatttaagtcccctatatgatcagcatcctgatgcgataatgcgattgcctctaaatgatcaatgccacagctgtagaggtaattaactgttactttttccgcccgactcacaatttgccgccgttgccacttttcttgcggtaaagctagtcggccgccggtgtcaattaacaggttatgtcgattgaagggttgttgaatcaacaggctatcgccttgcccgatatcaaacataatcacgcggccaaccggattaaagtggataccaataaaactaatgacatacaggctgataacagccccccagccccactttgctcgccgaccagtacttgccatcaaccatagtgtgcctatcacaattaaaaagagtggtattagctggattttaccgaaagtaattgtcgcatatgggaacgttgcaatccaagctaatcctttatacagcgtcgttagcaggccttcttctaaccaaactatcatatgactaacaggccataagcaaatcgctaccataatcaaacccaacatgactggtaagaaaatcggcgcgacaatcccattaatcaaaatcgtcaagatatgccaacgataattaaaccgcaagcacaccggtaaacttaacaagcctagccaaaatgccgttgtaaaagtaccatggcgccgctgataaatcaatccaaaagccatcagatagctcagcaatccccccatactgattaataaatacggctgccataaaagattgaccagcaatacccaactccaactatctaaacgcgattgctgaaaatgacttacttcgcagattaatcgtagtaagatcagcccgatagcgcgtgtaatactcgtgcctccccccacaaacaacgcataaaggggtagcaaacaaaacaagctaacattcacccattcacgcgggactcgacacagcgttgccaatcgacgaatgattgtcacaaagtagaatacatgcaatccggataaactcaataaatgaataatccccaattgacctaacacattctggtaggccaggccatctgactctcgaacaccacataacaacgcctctgcatgaaaactcaacgctggtggcaattgtcggagataaatcagcccctgttggcgccgttggtggaaccaatctagccaaccttgtggtggaatgcgtctaaagaccgttccgtcaattatatttgcttgataaaaacaatgcttttgctgccccataaagcgcgcatagtcgaactcattccggttagtagcaccttggatacgctctaattcaatatcacccgctaataataacggctgattcgtcgtttgccaacggcgtttttccgctgaactctggcagcgatagtagcaaacaacacgttggtcatcattctgcccctgcgccattaattgaatctgatcgccagccactttgatcgtatcgggttgaatcttatatacttgattatttggtctaaccggctgttcgtaggtgcgccgtgccagccaaaaatggcaaccgcctaaacacagtaccagtccactgaccattaacacagctggttggcgtaagcaccacagtcgcagtagacacactatcaaaagacagctaaaaaaaagtggtgcttgtcctagtaataacgcatttaaacttgctaaacaaataactggataaacccagttattcttaatcactcagcagtttgttcattctccaaaaagttaacgagggtgttggcgtcattcgccgttaaatcgacttggtccaattcaatactagatttttcaatcaattcatacgcatattcgtcgttatgataatccttttgataatggattttactgatcccagcttgaataattaatttagtacactgaagacatggaaaatgtgtgacataaatttcggccccttccgtctgcacaccaaacttagcgcattgagtcaaggcgttcatctcggcatgaattgttcgtaaacaatgcccgtcccgtaataaacagccaacatcgatacagtgactttcatgtgccaccgaaccgttgtagcctcccgcaataattcgccgattacgaaccaccaacgcacccacaaacaatcttggacaggtgctacgcatcgacaacaagaccgattgaagcataaaatattgattccacggcattctcttttctgacacacgaattccccctttaaagttaatagttttagtatagcaaaaaaataccattcacaaactaattaacacaaatttgtggccgtaattgttcaaacgttttcggcccaattcccccaactttttgaagatcttcgatttgtttaaactgcccttgctcatcccgatatgcaattatttgttcagcttttttaggaccgatgccatttagcgtttgcaattgtgtcgcatccgcttggtttaggttgattttagcatcagttgatatcggactggctcccgcttgattgtcagtcgcagcctgtggctcgtctgccgctttcactaattcttcggcttgcaccgcttctcccttagttggcacatagataataagttggtcactcaatgtttgcgctaagttcaactgactcgtatccgctgcttcggtcacatcccccgcttgtttcagcacctcaaataaacgcgtctttgcaacacaaatcggataaatccctggatgtgccacagcgcctttgatatcgacaaacccaccttttgagacgcttttcttctgtttgacgggttttgccttcacttttcgcttagttgattgcgccatcaattgttgattggttgatagaaaacgttgttgccgactatgctgccaaaacacaccaccactaagtaaaattatcaccaaacaaggtacccaccagaatcgacgataccgttgccaatagtcgcgccacatttttcgccacctccttattcctaattaccccaaaacgcaaaaaaaatttgccgattctttcgaaccgacaaattttttaatgtttggctaaataatccaatgcgtcgtccaagtttttgacaggaacgattttcatcttagtaccaatttttttagcggctgctttggcaatcgcataattattttgataatggggttctacctttagtatggcttttgtcacgggatcatcaggtgcgaaaaagactttggcgccttcttgactcgcaatcagtaccttcttatcaattccgccgattggtcccactgtcccatcaggatccattgtccccgttccagaaatcttgcgaccacccgttaagttttgtttcgttaattggttataaatctgtaacgtaaacatcaagccagcagaaggaccaccaatttcacccgcatcaatcttaaccggcacttttgtcacaatttttgagtgatctgtcagcgtaattcccaaaccagcgtagcgcgatttaggtaatttaatcaatttacgggtcgcagtcttacgctggccattatgttcatagctaatcgtgactttttgattcactttaagcccttgaacatacttgacgaacttatttgcactcttaaattgatgctgatcaattgccgtaattgtgtcaccaatagccagatcttttttaaaagctgaattatctaaaattgacatcacatagacacccagatattgagtgtggtattcctgatgtgccttttgataagccgcctcaatcgcaaaattaatcgagctttccatgtagtatttttgaatctgatcatacgcttcagtatcatcgtcacccattagttcatcacgactaataatctccgtaaaaggttgtgttttagacagtaatagctgtaaccccgtcactggtccttgaatcccgacggttgttaacataaagtggcccttatgttgatctcgttgaccgttaactttaacaaactggttggtattttcggccgaaccgaccccttcgacgtaataatgcgttgggataaagcaaaaagcaaacacgacgatcaagccaacaatccataggagatgcttcaatagacgtttattcttattcatattaatcactttcaggtcctaatttttgtgcaagcgcagacgcgacaaccggcggcaccaattgttcaacctgcccaccaaacgttgcaatttccttcaccatacttgatgaaataaaagcaaattcttgctttgctaataataacaccgtttctaaatcagcatcttgtgtctgattcaacgccgcaatatcacgttcatgctcaaaatcattggcattccgaataccacgaatcaaatatcgcgcaccgacttctttagcaaaggttgccgtcaacgtcttcgattgtgcgattaccttaacgttatccaagtgttgcgtcgccgcttcaatcagttcaaccttagtagttgcgtcaaataacggttgtttagcagcgttagtcattaccgcgataatcacttggtcaaacaagtgacttgcccgttcaacagtatcgagatgcccatttgtaaacgggtcaaaacttcccggaaataatgcaattttcggcatatagctgcctcctaaccaataaatttaaagattgctacttctgtaatcccataattctgttgccgtttcagtatgtaatgcggaatgtcagttggataatcaaccgtcgtatcggtttcgcaaagaatcgtcgcgtctggtgctaataaccccatttcgacgaattgttgtaactgaagcaacatctgttgttccttgtagggtggatctaataaaattaaatcgaattgaacaccagcatccgctagtttcagcaacgctttttcagctggcatcttccagattgtaaagcattctggcattttagtaaccgcaacgttttcttcaatcgtttgaatcgctgcatattggcgatcaactaaataagcatgatccataccgcgtgaaacggcttcaattgcgagaccaccgctaccggcatataaatcaagcgcctgcccaccgtcaaaaaattgccccaacatactaaacattgcttctttaaccttgtccgttgttggccgtgttttcatcccagggacagcttttaacttgcgacccccaaattctcctgcaataatccgcatctctattactcctctaattctgccgcatcggcaatttcttgatctgagcgtcctactcgattactgaaatccatatcaatagctggtctttcagaaggggtcactcgtttgacgtagtgtaatttttttaaccgttgcataacagtttcggcatctgccatatctacgtatagataaacatatttcattcgtttcgaggtgtaatacacaagtccgtaacggcgtaattgctttacttgtcgtaatgaatagagccagacgacaattccttggcgttgtgtgatttccaatgtcatttaatcagtccttttacatttagtcaaaaatcatcattgtttgttcatcggtacacagaagcgttaagtgctgatagcttggattattaatcgtaagttgcaacgctagattctgttgttgcgcaagcaccagcccttgggaattgagcccttgtggccaataaaaaagttgctcgcgctgcggaaaacccgctgctcttaacggagcctgtttaaagtcggttgctgttaaaaaggcgtccgtctcttgtgtcgcttgtttgcgcacttggtgcagcttttgcagtccctttttagtcaaccactgcgttggtgtacttgttaattcactcaccaaattctgtgtattttgcaatggtagttgatttatcgtgagcgcaggttggtcattattttggcgtaatgtctgcaacgtttgcaccaaagcgagttgtcgttgactatctgtttgcggttgttgcgactttgctagctcatccactgggactggtgtttttgaaacaactcgatataaatcagtttgtagcagtcggttcgcatttaaatacatcacagctgtcaatcgttcttgctgcatcactaaagttgcaaacgtctggtttttaaacatcactaacggcgtttgttggtgttgctccggcgttaaccgcaacttaaattgttgctcgtgtaacgtcactaagagcgaagttggtaacgccgtcttcttagttaatgtagcccgcttttgaaaaaaatgaaacggcgccacatcgttgtccgcaccaacaaccatgatttgttgtgtttgattggattggttatcaatcagcgcttcgacatactgtcggctatctaagtgaaataaccaccgtcgttgattttcatcagtcagctgttgctcgaccggttgcccataggttgcaattaattgttcagctggttgattaatcagtttcgccggcccttgtgttttcgtcagtggcgtttgttttattgaccgttcagtcgacggggcttgtgcaaccttaggctgattaaccgctggtgtttggataatcggccaaccataaaggatgaccaaccagacaatcaatgcaacgattaatcggcgtgccccttttatcatgctttcacctcactaattcgctgccgcagcttttttctcttgtgcgctgatgttcaacacgattcccagtgcaatcgctagaaccatcatacttgatcccccataactgatgaacggtaacgtcaccccagtaatcggtaagattcctagcaacccaccaacattgaatagggtttgcacgaaaatgatagtgccaattccgtaacataataaagtgtgatacatcttagtcgcatgaatccctaggtaaaaaatccgtgctagtagcgcaaatagtaacgcgataatcacgagggtcccaatcacacctaattcttcagtggtaatcgataaaataaaatcggtatacggttctggtaagtaaccgcgcttttggatactattgccaagccccaagccaaaccaaccaccattattaatcgcatagtaggaattcactaactgactcccacccatattttccaattcaaatggatgtaaaaacgataaaatccggttgaacttataagaattaacgttcgttgaaaagttaaagtgccgtaaaatactaaataaaatcataaccgttgttgtgaccgctgtaatcagcgaaaaaccataccaatatgacataccggtgccaaaaaacatgactaccatcacagcagccaagatactagcgccccctaaatcaggttgaataaacaccagtaggatgattccagcgactaatacaaccggactaaagaataattttaaattatcaacaaatccgtcggccagttcattttccttacgcgagagcatattagcaaggtaaataacaatcaataacttcgcaaattctgacggttgaatggtcagtggtcccaattgaatccacgcggtagccccattaatcgctgcgcttggtctgaaacgacttaacagcaataaataaatgagcgccaagaaaaccacaatcgtcattgcttttagaaaagtgcgattttttaaaacggataacttaagaaaatatgtgatcatcatcaagataaagcctaatgcgataaacactaattgcttggtaaaatacgcatctggtttcattccgcgaattgacattaaatccgaactcgccgaatagaccattaaagcaccaaatgcacataagataacatatggtagcaataaccaatagtctaaatactgaattttacttttttgaaactttttccacacagttacacctaatttctatttcgttcgtattcagcctgtccttgcccaacttgcatgccaatttgattgacccgttcttctaactcacgcatcaaagttgcaccctgtggcgcactaataagttgcatccgttttgcaaaatcaacctcgcgcgagaaaccaaataattgggtatcaattacctcttcaataattggacattgactcatacaaagcgcatcaatttgagcacgcaatagttgctcaatgcgtagcgcatccgcttctaaagtgagataagctgttgttttttgttcaatcataatttacgcctacctattcgttattaaaaagcatactctgttcgttattataccatatttatgcacaaaaaaaggtagccaagcggctacctctaatggtttttaatgattaaccttttttacgtttcttatcagctttttgacgcatacttgtgtcaagaatcttcttacgtaaacgaacagaagtaggtgttacttcacagtattcgtcatcgtttaagaattcaattgattcttcaagtgacatttctttaggtgtcttgatggcagctgagtgatctttaccagaagcacgtgtattcgttaagtttttacccttagtaacgtttacggcgatatctgtatcacggctgttttgaccaacaatcatgccttcataaacatcaacgccagcgccgatgaataattggccacgatcttcaactgattgtaaactataagttgttgatgaacccgcattgattgaaactaatgcaccgttacgacggcctggttcccagttcttaatcactggcatgtatttttcgaaggtatggttcataattccgtatccaccagtcatcgttaagaattctgttgaataaccgattaaaccacgtgaaggtgctaagaaagtcatccgtgtttggttattagcatcactttccatgttttgcatttcacccttacgttgggccattgagtcgattactgagcctgtatattggtcaggtgtgtcgatttgaaccatttcgaaaggttcgcatgtaacgccatcaatatcgcgatagataacttctggacgtgacaattgtaattcgaaaccttcacgacgcatttcttcaactaagattgaaagatgcaattccccacgacctgaaacaatccaagcgccagctttgtcggtatcttcaacacgaagtgaaacgtcagtgtgtaattggtgacgtaaacgttcttcgatcttacgaccagtaacgaaatcaccttcacggccaacaaatggtgaatcattagcagcaaatgtcatttgtaaggttggttcatcaatccgtaagattggtaaagcctcttgatggtcaactggtgtaacagtttccccaacatagatatcttccatcccagaaacagcgattaaatcgcccgctttggcttcttggatttcaacacggtctaaaccgatgaaaccaaaaatcttagttacgcggaagttcttagcagaaccgtcaagtttaagaacagaaacttgatcaccgatcttgattgtcccacgagaaacgcggccaatcccaatacggccaacatagtcgttataatctaacattgccacttggaattgaagtggttcgtcactattatcaactggtgctgggattgtatctaagattgtgtcaaagatagggttcattgtatgggcttgtgtatctaaatctgattcaagacttgatgtcccgttgatggcacttgcgtacacaactgggaattcaagttgatcttcatcagcaccaagttcgatgaataattcaagcacttcatcaacgacttcttcaggacgagcgcctgggcggtcaattttgttaatcacaacgattggtgttaaatgttgatctaaagccttcttcaaaacaaaacgtgtttgtggcattgtgccttcaaaagcatcaacgactaataacacaccatcaaccatcttcatgatccgttccacttcaccaccgaaatcggcatgtcctggtgtatctaagatgttgatttgtttgccgttatatttaacagcagtattctttgaaagaattgtgatcccacgttctttttcgatatcatttgtatccattgcacggtcagaaatttctgcgtgaccatccaatgtatctgattgttttaacatttcgttaactaaagttgttttaccgtggtcaacgtgggcgataattgcgatattgcgaatgtcttctctttttttcaagtgtttcagcttcctctcgctagtgacttgactagtgttgtttgtctcatgtatacaagctattattttaccataaaaaaatgggctgtgcttcatatattagcgtttttttgaaaatacgcaagtttttttcatgaaaatttaattatctttaatcatttgaaccattcataatcgtgacaatttcttgtattgcttgctttggcgcgataatcatcccttcttttcgcatcatggaaattggttgaccatcaaattgtaaaacttgaaaacctaacgtctcagctaaaacccgacctgcagcaatgtcccatggcgctaatttggagatgtaagcttgcacttgccccttcaacaaatgggcgaaagtgataccggcgctaccgtaaatccgcacacccgaacattgatacaacacctcttgcaagtgtgcttcattggtgaccagcatccgtgtattgacacagattaacccttcttgcaacggctcgtcgacagcatttttgagggcagcttcgttttcgaatattcccaactgtggaccgccccagaacaattgatcggccatcacatcataaataatcccgaatagcggctgaccgtcttcataaacgccgatcataatggcgaaatttgcccgttgcttcacgaaattcatcgtgccatcaatgggatcaataaaaaaagttagtccctgttgccaatcatcaggcacctcaccggcaccttcttcccccactaattgcgcgttcggataagccgtcttaatcttttcagctaagaaagcttgattagcacaatcgacattagtcactaaatcattaggcccagacttagtactaaccgttaatggttgtttaatttgtgtgcgggtataggcagctgcttcaaggatccacttttgcagcgaacgacttaaccgatacaatgcttcttgttccattttttcatccactttcactaattaagcgtcattttgatttgggttcgactactcctctttgcagcctgcatacaccgatatattgaatagcctgacgcttctgaaaaggccttatcaatttttttttcttgcatcttactttgaacaaccactttgaagtcacgataagcagcttgtaaatccgcaactttcgcaccaaattcataagcttgttcaacaagattatataatttcatgacttggacaacttcagctggcgtccagtctggttctaaaggataactatagttcgtttgcataaaggctcctaaaatttgcataaatttgcgccagtttcaattcaactgatgccattaatctctcatattataacgcacttttttagaagctgtcgaatccttttagaaatagcggaatcaaaaaacgacgcactcaactggtgcgtcgtcattctaaactatttattaaatatgaattggcaatcctaatgctaattcggcatcatccataatcgcttcacttaacgttggatgtggatgaatggttagagcaaggtcttctgcattcatgcctgattcaacggctaacgtcaattcagaaattaaatcactcgcgccaacgccagcaacttgagcgcccagaactgtgttatcatccgtattcgtcactaaccgcacgaaaccttctgtatctgctaatgataaagcacggccattagctgcaaatgggaacttaaatcctttagcgttcattccttttgccttggcttctgcaaccgttaaaccggtcgttgccaactcaggatctgtataacaaacagctggcattgcgtggtaatcaaccgttactttcttaccggcaatggcttctgcagccactttagcttcataacttgctttatgcgccaaagctgctccagcaacgatatcgccaatcgcatagatgcccttaacgttagtttggccttgttgatcaacttcaatcaaaccacgatcagccatcttaataccggcttgttcgagtcccatttcgtcggtatttggccgccgaccaacagtcaccatcacgtaatcggcaacaagttgttcttctttgccgccgacttcatatttaaccgtcacattttgatcagtttcaacagcttcttttgccattgcgccagtaatcacatcgacccctttagccttgaagttctttgtcaccaattgcaccatatctttttcgaagttaggtaaaatcgagtctgtcccttcgagaatcgtcacatgtgcacctaagttggcataggcccctgctaattcagagccgatatagccaccaccaatgaccactaattcttttggtacttccgttaagcttaaaccaccagttgaatcaataacccgtttattaaatttgaagcctttaatttcaattggacgactaccagtagcaatgattaaatttttaaaactgtacgtttgtgcactctcttctttaatcacgcgtaagctatgttcgtccactaaaaaggctgaaccgtctaacacatcaatcttgtgttttttgaacaacattgaaatgccaccagttagtttttcaacaacctcatgttgtttccagtcttgcgttttcgcaaaatccaatgttgctccagtagtcgtcacaccaaagacagatgaatctttcgcctcttgtagtcgatgaccagctgaaatcaaagccttggaaggaatacagccgacgtttaaacaaacaccgccaattgtttcacgttcaatcacagttactttttgacccatttcggccgcgcgaattgccgcaacatagcccccaggacctgaaccgatgactactgtgtctaattcaattgcaaaatcacctacaaccattttaaaatcatccttccatcaataatagctctggatcagctaataattcttttaattcgttcatcgcacgttgcgcagttccaccatcaattaaacgatgatcaaatgatagtgataatttcaagactttgccaacagccaactcaccatcagcgttgacgattggttctgtcccaattcggccaacccctaagattgcaacttcagggtagttaacaaccggtgtaaaccaaccgccaccaattgatccgatattactgattgtcattgaaccaccactcatttcagctggtttcaatttgttatgcaatgctttttgcgtattttcgccaatttctttagcgatggcaaaaatactcttgctgtcggcatccttgatatttgggacatagagcccgtgatcagtatccgttgcaattccgacattaatgtagtgtttataaacaatttcgttagttgcatcatcaattgacgcgttcaaagttgggaagtcacgtaagaccgttaccaaagctttaacgatgtatggtaagaaggttaacttaatgtccttcttagccgctacatccttgaatttcttacgatgggtcatcaatttagaaacttccacttcatcgaataaagtaacgtgtggtgccgtatgcttgcttgtcaccattgctttagcaattgctttacgcgttggtgacattttttcacgtgtttcccgttctggtgtaacagaggtgtatggtgtcgcagcaactggttgtgcagctggtgttgctggcgacgttggttgttctgctgtctctacagcaggtgctgtcgttgttgcagcgccattttgcatgaagatttgcacgtcttctttagtaatccgaccatgtttaccggtggctggcacttgactgatatcaacatcgttttcacgtgcgaattttcgaacagatggcatagctaaaatcgtccgattttggtcactaatcgcaactactgcttgactgcttggcgccgttgttttagctggtgttgattctgacgccgtagctggtgcttgttcagcagatgttgccgttgccgaattgtgacctggagcatcaatttcgaccaatacttgaccgacagtcgccacttcgccttcaccgactaaaattttaacgactttcccactaacaggtgatgggatttcttcaactgatttatcattttgaacttctaataaagtgtcatcttcttgaatggtatcgccttctgcgaccgcccatttttgaatttcaccttcggcaatcccttcaccaatatctggtaatttaaattggtaaacaccacctgcatcggttgcagtcggtgctgcttcgggtgtagcagctggtgttgccgtacttggtgtatcgttaccttcaacacctggtgcgtcaatttcaaccagtacttggccaactgttgccacttcaccctcaccgactaaaattttaacgactttcccactaacgggtgatgggatttcttcaactgatttatcattttgaacttcaagtaagacatcatcttcttgaatcgtgtcaccttctgcgactgcccatttttgaatttcgccttctgcgatcccttcaccaatatccggtaatttaaattgatatgccatacgtctaacgtcccttctttcgttatcgactaaaagttaataacttctttaaccttattttcaatatcagttgcatttggtaaccaagttgcttcagcttgtccaaatgggaatggcgtatcaggagctgaaacacgtgcaattggagcttccaatgaaagaacagcacgttctgaaatttcagaagcaacttgtgccccaacgcctgcttgtttttgtgcttcttgaacaataacgacccgccctgttttttcgacagaggcgataattgttgcaacatctaatggtgcaattgttcgtaaatcaattacttcagctttaatattctctttagctaggttttcggccgctttaatcgcttctctcaccattgcaccgtaagtgatgattgaaacatctgtcccttcagtaaccacagctgctttatcaagcggcactgtataagattcatcaggtacttcttcgcggaacgaccggtataatttcatgtgttcaagatacaaaacaggatcgtttgaacgaatcgcagaaatcaataagcctttggcatcatatggattacttggcacaaccacgcgaatccctggaatttgcgtgatcattccttcaaagttatctgaatgtaattctggggtatgcacgccaccaccaaatggtgcacgaatcgtgattggcatgttgcgtgtgccacccatccgataacgtgtccgtgacatctggccagcaatcgaatccattgtttcgaaaacgaaaccaaagaattgaatttcaggtacagggcggaagccttctagtgctaaaccgattgataaaccaccaatcccagattcagctaacggtgtatcaaaaacgcggtcttcaccatgtttagcttgcaacccttcagttgctcggaaaaccccaccgttcttcccaacatcttccccgaaaatcaagacgttcttatcatctgcaagttctaaatccagcgcatttgtaattgcttgaatcatcgttttttgtgccatcttaattcgactcctttgcactgtactctgcgatttgttctttaatgttttgtggttggtcttcaaatgtaacattcaagaaatctgtgactttttgttttggcgcagcatccgcttcgttgatggctgctttaatgtctgttttaacttgttcgatcaattggtcttcttgatcttgtgaccaaagtcccttatcagttaagaaacgacgcattctaacgagtggatcacgtttcaaccaaatatcgtctgtttctttggtccgataacgagtcggatcatcccctgataatgtatgtggtccataacgataggttaatgtttcaattaagaccggtccgttgccagcagttgtaaattcacgcgcttctttcatcacttcataaactgctagtggatccatcccatcgacttgaatggcagaaatcccagctgcgacccctttttgagccaacgttacagcagctgtttgtttttcacgtgggaccgaaatcgcaaagccgttattttgaacaacgaaaatggctggtgctttaaaagcacccgcaaagttcaagccttcatagaaatccccctgtgaagtcccaccgtcaccggtataaacgtaaacagcattttctgattggcgcttcttcatcccaaccgcaacacccattgcttgaatgtattgcgcgccgataatgatttgtggtggcatcgccttcaaagattctggatacttgttaccgtcaatatggcctcgtgaccataggaatgcttgtgataaaggtagcccatgttgcactaattgtggcacatcccggtaaccagggaataaaaagtcgtctttagtcatcgcaaagttacttgctaattggctggcttcttgcccagcagttggtgcataaaatcctaaccggccttgacggttcaaagcagttgctcgttgatcaagcacacgcgaccaaaccatttgtttcatcagttcaaccaattggtcatcactgagatccggcatcaattccggattaacaacctggccagtctcatctaaaatttgaacggtcttaaaatcttggctctcatcgctcaataacttctcaaaattaactgcagctttattattgaccatagtatccatatctcctctttaaaaaactgttttaatgactgcttatatctgtattacttaagcatctttacaagactaatttagcatttcacatcactaaatgcaagcgttttataagctatattagtcagtttacgctttcattagtttttattatatgtgaatctaatcactagttagctaattttcacgtctgttctatatctgttataatttaatttcgttttctgttatataatagcaaataataggcacaaaaaaagagtccgccgtagcagactcatcgttaaatttaagttggggtagttctatgccaagaccggttggggtatctcagcgttgccagcatgcactaagagctcttgaaacactctgactactggtttaatttgttgactgacttgcacgcaccgttcacttacccgcaaatcatttaaatcaatcgcaaccttaatttgaccaaggttgactaacttaatcattgttagcaggattgccccgacaaccaacgttgccaagcccatgaaagcgaattgattaaccattaatactgcacaaaacgaaaccaatgcagctaccgccatcataaaagtgcttcccactctaactttaggtgtttgtgctttagcaccaatcgttgcatctagcacaacgccgtgcaccatttcagtcactacctcgcccgcttcaataacgttaacatctttgttaactgttgcgattgtaacgggtgtcttttcgctagcagccaatactaaaatatcaccgggcacaatttgatctgcaccgattaagcgtaaaaaaccatcacgcataacgctaacccgtgcttgtgaattttctaatactgcttctcttttagcagcttcgacagttgttaagccacttggccgagttgccaataaacgcattaacatcccactgcttgtaatgccagtgatgttaacgtctttttttaatttcttgtgcatcgcgttcgacactccttcccttttgaggaagtcgtcgtaaaccgctagcctaatgctggcagtaaaatgacagaccacctcgaatgatcaccatcgctactacttacaggtccttcagctgttttcatcattttactcaccagactttctctactttaaatttagtcataccgctttatccgacaaaaaaagacgcacaacaattgagcgtcatccatttatcatggcgttcccaatcgttcagttttagcactatatgacgtagaaaccatgttcagctacgttagaaaaagccttcattggcagtttcagttgactcaattggcatctctcgatgtttctgagtagcagcgtttgttcatataggagcctcacctaacggaaaagcaatatatctatactcttatactacccgtttcactttagcaggtcaagcaattcattccgttttaacttgaattgtgctagaataatgaatgacgaattaatcggaggtcttaactgtgatattaatgaaagatattatccgcgagggtaacccaacacttagaaaaatagctgaacctgttacttttccgctatcagatgaagatcggcaacttgctgctgacatgatggcatttttagaaaatagccaggatcctgaacttgctgaaaagtaccacttgcgcgctggcgtcggtttagctgcaccccaagtagatgtttcaaaacaaatgtctgctgtcttggtccctggaccagacgaacccatcttcaaagatgtgattatcaaccctaaaattatcagccactctgttcaaaacgcagcacttgctgaaggtgaaggttgcttatcagttgaccgcgaagtgcccggctttgtgccccgccctgaccgtattacactacgttaccaagatttagacggtgaaagccacaagattcgcttaaaaaactacccagctattgtgtgccaacacgaaatcgatcatctaaatggcatcttgttcttcgatcacatcaacaagcaagacccattcgcagcaccagatgacatgattattattgaatagaagtgcgattggttgtgcttagcaactgagcattaatacagaattggcagttatcccgaattgtgggataactgccaattttagattaaacgggagttgttgcacccaagagcacgttaaagaagaagaagtgctaattcgagttggtcaggctttgaggcttaacggtaaagactactcaagaagcacataaaaaaaagcgtgattgaaatcttctaatgagatttcaatcacgctttttttatgcttccgccgcttcaggcgtatcggcaaattgactgttatataaattagcgtacacaccaccggccgctaatagcgaatcgtgcgtcccttgttcaacaatttgaccatggtccatcactaaaatcaaatccgcgtcgcgaatcgttgagagtcgatgggcaatgacgaaactcgttcgcccttgcatgactttttccatggctttttgcaataaaccttccaatcgggtatccaccgaactagttgcttcgtccaagattaaaatcttaggatccgcaatcacggctcgggcaatcgtcaatagttgtttttgcccaagcgaaacgttgcttgcttcttcatcaatcatcatttgatagccgtttggcagcgtatggataaaatgatcgacattagcggttttagccgcatcaacgacttcatactctgtcgcatcgagtttcccgaaacggatattatcggtgattgaagcatgatataaccaagcatcttgaagtaccatcccaaattgggaacggacttgttgcttgcttaattgcttcgtgtcaaccccatcaatccgaatcgttccagatgtcacatcataaaaacgcatcaacaggttaatcatcgttgtcttcccagcaccggttggcccgacaatcgccactttatcacctgggttagcagtaaagctcaaatggcgaatcaatggtttgtctgggttatagctgaaactgacatcatcaaattcaactttaccttgaacgattgctggcaacgatgctgtttcattatcggttgcttcaactggctcatctaagatttcaaatacacgaccagttgcagcagcagctgattgaatcacaccagacaactgtgtaatctgtgagattggttggttcacttgccaaatatattgaatgaaggcttgtaaattaccaactgaaatcacaccgtgcaagacataataaccacctaacgttgccatcccggcatacgtcatgtttgtcgttaaaccaactaacggcatcatcaagccagaaacaaaggctgccttaaagccatagtcagttaaccgatccgtaatttctgcaaaagcagcaattgcgcgttcttcttgtccgtaaagtttcaagacactgaagccgccataattttcctgtacaaagccgttcatttcgcccaacgtgtcttgttggcctctaaagtacggctgcgatttctgaatgacccgtcttgaaatcaataacgatgctggaatcattattaatgataagagcgccatccaaatattaatcgtaatcatcatgatcacggccgtgatgatccctaagatcgatgtcacaacttgaattaaactctgttgtaaagcgttcgtaatcgcgtccacatcgttggttacccgtgacaagatattcccttgttgttgtgaatcaaaaaaacgaacgggtagcgcattgatttgcaaatcaatgtcgcgccgtaaatcacgcatcgcccgttgaacagcccgcgtcatccaaaacgagcctaaaaacatcgtcacttgatatagcaacgcaaagctcaaaatcatcgcaatcaccttcgcgatataactaaaattaatcgcaacgtgttgtgctaaactccgactgatttcagtaatggctagtcccatgatcactggccacagtgcattagcgagcaccgaaataacagttgcggtaatcgcaagccaaaatgtcacttgatacggcccaatgtagcgcattagccgtttaagttctctaatattcttcattgagttcctcctgtgataactgtgatgccgcaatcgcacgataaatctcgttatcttttaataagtcgcggtgagtcccaataccaaccacttgaccttcgtttaagacgacaatccgatcagcattcatgatagtcccaactcgttgtgccacaatcagcactgttgcctctttggtgattgacttcaatgcacctcgtaacgccgcatccgttttataatccaatgctgaaaaactatcatcaaagatataaagcgcggggcggcggacaatcgctctggcaatcgccaaacgttgcttttgaccaccagataaattgctcccaccttcggctaaataagtttgtaagccgtctggtttttcagcgacaaaggtatctgattgtgcaattttcaaagctgtccataattcttcatcagtcgcattcggattaccataacgcaagttttccgcgattgttccggtaaataacaccgctttttgtggaataaaaccgatcttttggcgcaacgccttaagttgatagtcgcgcacatcatgaccgtcaagcttaatcgatccacgtgttacgtcaaaaaagcgtggaatcaattgaatcaacgttgacttaccactcccggtactcccaataaaggcaaccgtttcacccggatgcgcttggaacgtgacatcccgaacgactggactttcagtcggacctggataagcaaaggagacattatcaaacaccaattcaccttgtgtgtcggttgttgttaccccgtcttctttttcggtaatattaattggcgcattcagaattttttcaattcgttctgctgaaacagcggcccgtggatacatcatgaagacactggcaaataacataaatgaaaacagtacgtggaaaatatattcaataaacgcaatcaacgtcccaaccgctaagtgaccaccatcaatctgaacagccccttgccaaatgattagaacgaatacgatattaaagatgaacgaaaagcccggttgtgctaaagccaccaacgtaaacagccggatagaactatgactgtagtcatcattcacttttctaaagcgtaatttctggaattgttcccgcacaaaagcacggacaacacgaatcccagtcaagttctcacgcagattcagattaatcgcatccagatttttttgttgttccgtcgacatcggttcagaaacgcgaccaatcaagacaacccccgttagcaggattggaattgccgcaaatacaatccatgagagcgattgacttgtccgtacaatcatgaaagcactcgcgacgatcatcatcggggtcataaaccctgtccgcaacacttgggtcataaattgcatcacctggaaagcatcattagtggtccgagtaatcaaagaagacacaccaaattcgccatactcactatgggaaaactgcatggtttgtttaaaaatatcgttacgaatgtcacggacgatattggtggttaatttgctaccagtataagccaagccaattaagccaattagtccgattaaacagattccaaccatcaataacccaaattgccacacaggaccaaaggtatgttgattaattcctttatcaataatttgtcctaataacgttggtaaccccaattcgattagaataaatccaaatacgcaaataaagttccaaaatagtaatttcttatatcggatcgtatagcgccacattaatttcatcggtgcaaactccttctaaacttcaaatttaatcttctacctgtgccatatctttaacatactcgattgtttcgcgattgacaataaaagcaacgtcaaaatgcaattgttcttccaaaaaccacacatcagtgactagcaaagccggataacgcggactgacggaggcaatccgccgttcgtaagccacttcattgagttgttcctcaattgcggctgccacatcctttaatgcagatgatgtttgtcggatgggcacttggtattcgaagaccatcacattattgccccaaatttcagtgggcaggttcgaaaccagtttggcttgcggtgcataaaaatccggctgactcgcttgcattttttgataagccaccgttgcaatttcatccgcaatttcttgactactgtgttgtaaaatccgcgtcgctctttgtcggcgtaaccgtttaatcaaccaggttaaaaaaagcgctaacgcgacaatgataacgactgacaaccaaattaacataacaatcccccacttctattgctcactaatatgataattataaccgaatcgaggcaaacacgctatttagagcacgtcgctcaatgtatactttaccgaaaagatatgctaaaatattcttaaatgttgagtaatcaacccctggacggttaatctttcgtttaaaactatgatgaataataaaggagttttacaattgatttataaagtacttttccaagcagacaaaacccaaagccctctacgcgaggcaactaaatcgatctatttagaagcagacagtgccgttgaagcacgccaacttgttgaagacaatactccctacaatattgaatttgtacaagaattatctggtaagcaccttgcttttgaacaagaatcagaagattttaaattaacggagttttaattaaatgaaactcgatattaagaataacgaaaccgccgttttcgccgtagggggacttggtgaaatcggtaaaaatatgtatggtgttcaattccaagacgaaattattgtgattgatgccggcattaaattccccgaagatgaactcttagggatcgattatgttatttcagactatcaataccttcaaaagaatcaacaaaagatcaaagccctcgtcattacccatgggcatgaagatcacattggtggtttaccttacttcttgcaacaagtccctaatgtacccgtctacgctggtccattggcacttgccttgattcgcggtaagttagaagaacacggccttttgcggtcaacagaattacacgaactaaacgaagataccgtccttaaattccgcaaaacaagtgttgatttcttccggactacccattcaattcctgatactttaggggttgcgattcatacacctcaaggggtaatcgttgaaactggggatttcaagtttgacttgaccccggttggtaatcaaccttcccctaatcttcaaaaaatggcacgtttaggtgaagaaggcgttttatgtttaatgtctgatagtaccaatgccgaagtaccaaactttacaaagtcagaacgtttcgtcggcacttcaatccgccatattgtggaacgcattgaaggtcgcattattttcgcaacgtttgcttctaatatttcacgggtctcacaagccactgatgctgcgattgctaacggtcgtaaaattgccgtctttggtcgcagtatggaagcagcggttgtcaacggtcgtgaactcggttatttaaatattcccgatgaagctttagttgatgccaatgaattaaattcgttgcctgccgacaaagtgatgattctatgtacaggatctcaaggtgaaccaatggctgctctaagccggatcgccaatgggactcaccgtcaaatttcaattcaacctggcgacaccgttgttttctcaagcaatccaattcctgggaatacaatgagcgttaaccacgtgattaataagctttcagaagctggtgctgaagttattcacggtaaagtgaataacattcatacgtcaggtcacggtggtcaagaagaacaaaaattaatgctccggttaatcaaaccgaagtacttcatgccttgccatggtgaataccggatgcaaaaaatccatacggaactcgctcaacaatgtggtgtggaacctgataactgcttcatccttgaaaacggtgacgtcttagcactcacttctgactcagcacgggttgctggtcactttagcgccgaagacgtttacgttgatggcaacggaattggcgatattggcaatgtcgtgctccgcgatcgtaaaatgctctcagaagaaggtttggttgttgttgtggcaactatcaatcttggtgaaaagaacattctcgctggtccagatatcctctcccgtggtttcgtctacatgcgtgaatcaggtgaattgattagcgaagcccaacgccgagttttccgaatgatcgtcaatacgtttaacgctaacgacaaggtcactgaaaaccaagtccgcgaagcaatcattgatggcttacaagacttcttgtttgaaaaaacagaacgccgcccaatgattttaccaatgattattcaaagtacagaataataagttttgcgccaggtcaatatatgacctggcgctttttttattgtttaatgcaagtttttattgtcaacatttggtaaaaaccgctataatatacaacagattactttttctgaaaggcggcttgttcatgccctccaatccccatttttacatcattttaaaccaagttgccggtaccggtcaggcagcgagtatctggcctaaaattgaaactcaattaaaacaaaaacaaattcactatgaccttcaactctcccactacgcaggtcacacgacccaattggccttccaatttgcaaagtttaagtacacggatcaaattttattaattattggtggagacggcacgctcaatcaagccatcaatggtctccagaatgctcagcgcggcgatattccgattgcttacattccttgtggatcgggtaatgacttcgcccgtggtgtcgggattagtcgtgatccattgaccgcactcgaacaaatcttgtcggccacaatgccaactgccatcgatttaggttattatcatgacacaacgaagaacgaccatggctacttcgttaacaatgtggggattggttttgatgccaacgtggtcagcaccaccaatcattcaaatcataaacgacttttaaatcgattgcacttaggctcattagcttacatcagctcattggttaaagtttttatgcaccaagatgcgtttgaagtcaccgtcacggctgatcaccaaaatcattattttaaacgtggctttttagtgaccaccactaaccatccctactttggcggaggggtccccatcatgcctagcgcaacggtcgacaaccatcaacttgatttaattgtgattgaaaaattgaatccctttttcttttgctatctttttgtgatgatgttgtttggtcggcacacacgctatcaagcggtgcatcactttgaaggaaccaacttagcgattcaaacaaaaacattagaattcgggcaaatggacggtgaagaacttggtagccggacatttgatattcactacagtcttaaaagccaggcattttggctaaagaagcaagcataaataaaaggcgctgcctccaagttgggggcagcgccttttaacgcgctcttcaaatcatgttcctgtgcctagcaacacaagtcaaccgattgctttcagcaatcattcgcattgttaggctagtgctcaaaagttgaccaaacttgattgcactcatttctttagaagtaatccgagaagtatggttggtccattggaataatattctcgagattttttagtgcttgtcggttggcttggagtctttcaatctttgccaagtatgatgggcgtcgatagctcatcagcattgttgttagtgtctggatgtcgcattgaattcgttcaccgactgggcgacttgtgacctgcacttttccttgttcatcccaataaacgccaaacgtaccgttattccattcagctaatggatcggtcaattcaatgtggaatgcttgcccgtccgtttcaaacggataagccaacaagaattcacgcacatcaacaatccgcgccataaaatatggcttaatcgtctggtcaatatcaccatcttctaataagaatgaaatcggttcatcctgatattgattacccttgacatgttcaatcattgaataatgcgcgccaatgaagttccacagaccaatccgggcttcttgattaagataaatcatttctttaatatggaagacttcgttggcaatccagtataaaacatagccggtgggttgttcattttcatcataataaacaccagcaatccgttcttcttcattttcccaacgccaatattcatcccagttcagttcgttacgaatcattgcaccgtgattttttagtgcaaaccgttgatacgttttaatcacgtcttcatcgtcaatatcaaggcgttcaacgtgcccatttaccggccgttgcttaggtaattggctatcacgaatatcataagttaggtgatcagacatgatctcccaccctttcttacgataaaacggaatgctgtatggatataaatacgatatccactgcttattctcacgcatcttgttcaagccgactttaaccaagtcatgcatcaaaccatgaccggcatattccgggtaagtcccgacaccagtcaaaccacccatgttaaatacctggccatgaatgttcacgcagcaatgatagatggctaattgtgaaatcagttcgtccccattaaaccatccgattacgtcagatttttctaatacgggacgtttggcgcgttctaattcgccctcttcgtagccactatcagaaacttcctgatcggtgacttgaaaaacataccgtaataagtcattaaattgttctaaatgttcaattgtcacgggtctaatctctaaattagatcgctggtcaaccattgtttcgcctcatttttcgttagttgtttaccctattatacactattttgatttcggcataaaatcgtacggtgtcaccccggtcatcccaatcattggatccacttgctgttgcgttagaacagtcggtgttaagacataactgattggcgtttcttgtattgcgtcgtcgtcttctggcactaagttcagttgttcatcaacagccgtttctggcgcacttggtggtgccggctggtcaacaattgttttggcttctgcctgccccacactggccgtcttaatggcggtgctgagttgttcaccgttaaagacactttgaatccgttcttttaacgtcgtttgccgattggccgaaagttcctgagctgctttttggaaagcactcggttcaccaatcagaatcaacaatgatttagcccgcgtgactgctgtgtacagtaagtttcgcttgagcattcgttggtattgattgaccaatggtagaatcaccatttcaaattcagaaccttgcgccttatgaatcgacgtacagtaagccaatgtaatcttgtgccactcactccgcttataggtcacttctgcactatcaaaagcaatggtgatctcgtcaaccttgtccgcactctttttagcataggtaatccccgtaatctgcccgatttcaccattaaacacattttgttccggactattgaccagatggagtactttatcgccaatgcggtagtgaacgttaccaatgctaacttgttttttgcggtcatctagctttggattcatgatattttgaatcatcgggtttaactgatcaattccggctgctcctttgtacatcggcgctagcacttgaatgtccttagtttcaaaaccacgcgctttggccttagtaacgacttgttcaatcaccgattcaatttgatacggattacattgaatgaaactgcggtctttttgcggcttcaacaaatccgctggcagttggccttgattaatttcatgcgccaacggaataatcgttgactggtcatcttgccgataaatacgttgtaattcaaccgctggaataaccttactctgcaataaatcaaagaaaacttgccctgccccgacggatggtaattgatccttatccccaaccaatacaacctgcatatgactgggcaccgcccgtagtaatgagcgaaacaagtaagtatcgaccatcgacatttcatcaataatcaataggccgccttccaattctttgttaccggaaacatctggattattttcgcggccagtgattccgagtaagcgatgaattgtactagcaggcaaacccgttgtttcactcattcgttttgcggcccgacctgttggagcggccaataaaatcggaaacggcgtgtctttgtactcattaatatctaatgacagcccgtttaattcagcgtataatgtcacgattccgttaataatcgtcgttttcccagtaccaggtcctccggttaataagaacgcccggtgagtcatcgcaagcttaatcgcctcttgttgtacgtcatcgtatgtcatcttaaaccgtttttcgaggtggcgaatttcttgatctagatcatgtttaggatagctaagttgatcgcgttcattttcaattcgcattaaatggttcgcaatttgccactccgcattaaataacccattcggataaatccgattctcatcaccaacgactttcccatcatgtgcaagtgccatcagttgttcagccaccaagttcggatcaatagcaacattgcgtgctttttccatcaactcaatactagctgccaataacggctgggcctgggtataggtatccccagcttgattggtcaactcatttaacgcttgcattaaagccccttgcacccgcacggctgaatcagcggcaaacccgagggtctccgctaaattatctgcacgtttaaagccaatcccagcaatgtcagccacgagttggtacggattttcttggataatcttcagcgtatcttcatggtaggtctgatagatgttataggccatcgagctcccgaaaccatagttgtttaagccaataataatctgttccatcccattattaatcgtcagcgtttcaacgagttgtgcttgtttcttcgcatttagccccaatggttctaacgccgtcggatcctctaatattttatcaatcgcgtcaattccaagagtatccacgattttttcggccgttttctgcccaatgcctgtgaatttttcgccagacaaataagcgactaagccggccttagtcgttggttgatccacttggtaattatcggcttgaaactgtttgccatatttaggatgagtgaccactttgccatagaaggtatatcgttcatcttctttaatgtcgccaaaactcccggtcaccacaatttctgtttcgtgccagtcaattgtcttatgtgctactttaacgagtagaattttaaaaaaattatccggactctcatagaaaatactctggacggttccggtgactgttggtttggtttcgtctgtctttgttatatccacaatcgccatcccttattctttttgctttttagcctgcatgaaaccttcaatatcaattaactgttgtttgttctttttaaaataatccggtgcatagtgcttggcttgttcgaaataaggctcactatcagcgcctaagaccagttgcgtcaagccatacttaaataatacttcaccattttgaggtgcaatggtcaatgcctttttaaggtaggtctgtgcttgatcaaaatcacccaagctcgttaaaatatcgcccactaaaagattggcgtctagttggtctggttcttgctcttgaacggtcaacgcaaacgccaatgcccgtggattctgttcgagttgatgatatgtctgcgcaagcatatactgcgcatctgttgattgtgagtcttgcaccaactgcatgaacaagggcaccgcttgttgataagcttccgcttgataatagagtgttcctaatgcgtaagtcaatgcagcttcattaggaaattgcgtcaacgctttttgcaaaagtgcttcagcttgttcaaaatctttaagcgtcgttaaaaatgtcgcaagggtaacgtaagcttcaatgtcttctgagtgatcttgtaaatattgtacgagatctttaacagcggcttcgtggtcgccagcggcccattttgctagaattgcttgcacgtgatcatctcctatatcgtatctgttgcggataattgcttgctgaggaagtgtgtatcattccacttaattagtttgaaagatgctccttgatcgtcagttgtcatcgtggtcacagatgaatttgtcacaccgccgtctttgcggacctgagccaatggtgtcttgagtaaggactgcatcatcgccaccatcgctgccccatggctgacaataataatatgatcagtcggtttagcagccttcacaatcgcgtcaattgcttgcgttgtccgttcaatcacttgttcaaaggtttcccctttaatttcagttggatcatactccgctggtgcttcacgaaaggccttcacgattgtcggatattgtttttcgacttccgtaaagcgcatcccttccattagaccgagattaaattcgtggagtgcatcaacaaccgtaatcggaaaatcctgccctaagtctcgttttagcgccgcagacgttacctgtgtgcgttttaacggactcgtatataaatgatcaaaatgaatgggctttaaaaatgtggctaattcttcaatttcaacgtaactactgtctaataatggtgaatcaccacgtgcaccttgatagcggccttccaaattccattcagtcttaccgtggcggataaaatataaggttgtcatgcgttctctccttaaaataacttacttttcattatgaaagagttacgccctaaattcaagtcaatcgactaataaagcaagcatttttcctgtaaaacgccatcaaaaaaaccgctaggataaaaatactttttatcctagcggtttcatctattagttgctctaaacgtgtttcagtaggcatatttctgcggttaaccctatttgccaaatccagttaatcctcaaaatatgaacgcttacttacacactcttttatttactttctgcgacagcttgcattgcaattgcgttgacgtagttgactggttgatcgtagtttggttggaagaacatgtcaaccattgctaattgatcaatcgtcatcttcgtttgaatggccattgaaatgacgttcgctgcttgagcaatatcatacatacttgtgaatgaaccacccaatacttgacgcgtcttaggatcccacattaagttcatcaaaaccggtgtcgttgatggcatgaaatcagggcggtaatcttgttctaacgttgttgtagcgacttcaatcccacgcactttcgcgccttcaactgttaggccactccctgaataggtgcgaccaaataattcaacggcagaagttgcttgcgtgcccatgtacttttcagttggtgtttcgatgttgcggccgattaaaaggccttggcgaacagcgttggttgccaatggaatgtaatctgctttttgtgttggattgtaatgaacagctgctgaatcgccggctgcataaacatccttaacagacgtttgcatgtattcatccgtcaaaatcgcaccgttacctaacatatcaacttgccctttgaaaaggccagtatttgggcggaagccaacacataaaattgcaatgtcggctgtgtattcgttcttatcagttttaacagtgacttgatccgtccctgagaaactgaccactttttcgctaagcgcgagggttacaccgtggtcacggtaatcttgttccacgatttctgagatattaggatcgaaattcttgccgagtgcgtgtggtaatgcatcgattaatgtcacttgcttatcagttgttgcataggcttctgccaattcggcaccgatgtaacctgaaccaatcacgataacactcttcacatctggggcgctcttcttcaattcattggcatgcgcccagtttttgcagagcttaacgttcggattgtcaatgccttcaattggtggaatcacaggtgatgagcctgttgtgacgatgattttatcaaatttttcggttgtttcttcttccgttactaggttcttaacgcgtaatattttttgatctaagtcagcttctaaaacagtgtgttgcatcttcatgtgagcgcccgcttgcgctaacatttctggatttgaatagaacattttctgaggatcggctacatggccgcccacccaaagggcaatcccgcatgataagaatgataaattatcgtgtgtttcataaaccgttacatcccaatcaggatgttctgccaatgttgcttgtgttgcaaatgtccctgcgtgtgtacaaccaataactgctactttcatcatgttacctcctagaaatatccaaaaaacgacggttaatcgttgagaatttgtgaaatattactcaaatagaacgtaactatattgtacgccacttagtttcgaaaagtcaattgcctccagctattaaattaatttcacaatctaaaacgaataaccacttatgttttaaacgttatattgtgattttattctaaaaaaggtcgttgaccacttattgaacaaacccacaaaaaaagtgctgataaatataaattcatcagcacttttaacgattaaattagatatattgtaatactttcatgtcagcatcatcgttcgcagccttataagccacgtcaatcgtgccgccacctaaacattctgcgccgtcataaaagacaaccgcttgaccaggagtaatcgcacgcactggatcatcaaagacaaccgttgcagttgtgtcagatgtcatgtggacggttacgccgacgtcttgttgacggtaacggaacttagccgtcacgtggaaatctgtcccatgatcaactggtgtgatccaagaaatattacttgcatctaattgatcagcatagagtaattcattatggtagccttgaccaacatataaaatgtttttgtctaaatctttaccaacaacgaaccatggatcattggattcgccaccgccaccgattccaagaccggagcgttgaccaatcgtgtagtacattagaccgtcatgggtgcctttttcaagaccgtcgaccgtcatcatcttaccgggttgtgctggtaagtattcgcctaagaattgcttgaagttccgttcaccgatgaaacaaatcccggttgagtccttcttcttagcagttgctaagccagcctcttcagctaaccgacgcacttctgctttttgcatgtgaccgattgggaacattgatttttgtaattgatcttgagaaagagcgctcaagaaataagtttgatctttattgctatcaccgccacgcaacatgtgcgcgatgccgttatcatcgcgttcaatctgagcatagtggcccattgcgatgaagtcagcgtctaattccattgcgtaatctaagaaagccttgaatttcacttctttgttacacatgacgtctggattaggcgttctgccgtgtttgtattcgtctaagaaatattcgaacacgcggtcccaatattctttttcgaagttgacggaataataaggaatgccaattttagaagcaaccttggcaacatcctcataatcttccgttgcggtacagacaccattttcatctgtatcgtcccaatttttcatgaaaacaccaatcacatcgtatccttgttgctttaacaacaatgctgtgacagatgaatccaccccgccgctcataccaacgacgactcgtgtattactgtggtcaaccacaatatcaccatcatttcaaatagattctagttttctacgatttgaaggtcgtgaattccagtacttaacattatagcaatcttggttaatatttcaaactaaaacactcacttttcataagttaaacgtaaaaaaagcagtttacctatcaaactcctggtaaaccgctcttaaaacgttatttagccttctttaattaacacttcatgtgccactaagttagcaataataaaattaaattgttcgacgttttcagcattcttttcactcttgaaaatatcgactggatgtaagccatctggagaggtgacagacatcttcaacgtctgtaactctttaccaattgtcatcttcaacttaatcgcactgttaaatggtgaattaggatctaatggccgttccatctggaagttaccattgtttgtgggcacaaagccaacatctcttaatgtgtattttttaacggcgggattgagtcgatattgcaccgtactccccaaaaccgttgctgttgtttttaataaagccatctgcctaacctccatacactgaataagtctattttagcacaagcacgtaaacgctgcctaccccttagcggcttgctttgctaaattgcgtttcacaatcttcgtgagcgcttcggcaaaagcagcgacgtcttcgctcgatgtttcgtgaccaaaactaatccggatgctttcggcaacgcgcgggctatcctcaccatacatcgcgatcaacacgtgtgagggttccaaatcgccagcagtacatgccgaaccacctgaaattgcaaagcctgctaaatcaagattcatctgcaagacataggttgaaacacctttaatccagaggttcacaacatgcccgacttgatcagctccttctgcgttcagcgcaaaatcaatgtcgttggcttttaaatcagctagtaattgctgtttgaatccagcataccgtgcttgtaggtctgctttaaccgctggggtcaataattcaactgctttcgcaaaaccagctacagcgggcacattttcagtccctgcgcggcgcttcttttcttgttcgccacctaggacaaatgatggtaaatgaatcgcgtcgttgacatagaggaagccgatttgcttaggtccattgatcttgtgggctgaaactgccagtaaatcgatattgtcagcttgcacatcgatatctaataggccatacgtttgcgtagcatctgtgtggaaccaggcgtttgagtcgcggacaagttcaccaatttcgtgaattggcatatgactgccgacttcgttattgcccatcataatcgatactagaatcgtttcgggcgttaaagccgccttcaaatctgcgagatcaatcaccccttgttcgttgacgggtaagtaaatcacatcaaacccttgcgtttctaaataggccatcggttttaaaacggaatgatgttcaattgccgttgtaataatccgcttgccttctttagcacgcagtttggctgtctgaaggattgccgtgttattactttcggttgccccactcgttaagacaagctcgttatctttcgcatgaatgctctgtgccaaagtatggcggccggtatccaacaccgtgtgggcttggcgcccaaaataatgggtgctcgatgcattcccgaaatcggcctgcatctgttcggtcatcgtcgcaatgacctctggggccatgggtgtcgttgccgcgttatctaaataaatatgtttcacaatttttcgcctcattttaaaaagtatctataatagtttaacatagttcgcttttaaagcacggataaacacttttcgctaccaaaaaaggctgggacaaagataccttgtcccagcctttaaaacacttaatctcagattaagcagtcattaaagctgctttttgatctgctgttaatgattcattcatccggccactcttgaaaccagctaaatcaaccgttacaaattcaaaaccagcttgttgtaatgcttggttgatttgttcgctgtgggttaagaagtcagcaatttgtgcttctgggacttcaacccgggcgattgattcgtggtaacgaacacgaaccgttgcaaaacctaaatcacgcaagaatttttcagattgcatcacttgagcaattttggcttcagttaaggctgtgttatatggaaagcgtgaagaaactgaacagctcgctactttattccagttatttaagtttaatgcctttgctaattgacggacatcaatcttataaaaaccagctgtttgaaggacactttctgcgccagcttcgtcacgggcccgtaaacctggacggaagtcgctgttatcatccatgatcatcccatctaaaacgtggtcaaagcctttttcagcagcaatttggttcaattgtgtatagaacatcttcttgctgtaataccatgtttctggtgtgttgttggcaatgtgttcgtcagataagtagttcaatgttgttgtttcgacattcgcgcccatatcatgtgccaagtcgatggctttgttaaattcttcgtctgtgaataattctgagttagcaacgactgctaagacgttttctttgccgagtgtttctaaagccatttttaaaactaatgtgctatcaatcccaccagaaaaggcaacaatcactttttccatttgttgtaaactgacagttaacattgcttttttttcagataatgtattcattgttaaagacttctttctatatcattagattaattgttttaaagctgttaattcattttgaatccgatcggcatacaccaaatcgttgttatctaaactcttgacgatcatcaagtttaaatgcgcggcactatcaacaaagtttttgaaagttgattgactagcggtttgttgcgcgtcatcaaggctaccataaagttgttctgctgttaaaagcgcttgttgcgcttcaattaaactggttgagattgtccccggttgtgaggcatgagcagcgacttcgaataagtcgaccatcatgttttgcgtttgtttaatttgttcacgcatggttgattcctccgattaaattagatgccaaagaaactccgcataaagagtgcggcacatagaccaccaacaaatggtgcaattccgggcacgataatcccgtattgccaatctgagttggctttatttttaattggtaaaagcgcgtgagcaattctaggacccatatcacgcgcaaggttcattgcgaatccggtaggaccgcccatccccatcccaattgcccaaacaagtaacccaactgcgattggtgcaatcccaggtgtcttgatttgtgtaatggcgataattgatgaaatgaaaacaaatgttgcgaaaaattcaacgaagaagttccgtggtaaattccggataccaggtgctgttgagaagatgttacgaaccgcaacaggatcgacattgccttctgatgctttaaattcatcagcgtacatgatatagacgataactgcaccgacaaccccgcccaagacttcagcaactgagtaagggataaacattgcccatgaaacgttgcctaagatacattgtgctaacaccatggctgggttaattgaaacatctccgaagatgaataatgaaactgtaatcccaaacccccatgttgtaatggcaaataaatgacctgagccacgatactttgaacctttgaggacttcatcactgtgaaccccaaccccgaaaatgatcatgagcgctgtgcccatgaattctgctaataactgatgaatcatgaataaattcctccaaataataacgatttaatatctaaattttgatagctttaacgcgttacatcaggatagacccgactcgggcatactctgataaacagcaagataaacttgattaagtgccacgtcatgcgccttggcggcagctagacaatcgtcgaactctggactatatttttcgagatcgtcatagttcacgattttgacccgaatatcgccgaagcgcgtggctacagtgataaaatgacgtggcataatggtgcgccccatcgtctggtaacgcacaccaacagttgctgtgtgttttaagatcagataagtcatggcttgttgatcggctggatgaatcatgaccgttagcttaattgcgggccgatttttcttcatttgaattggactgaaaaaggcatcgagcgccccattgtccatcaataaatccaaaaccggcgctaaactttctgctgactggtcatcaatgttggcctccaacactaaaatctgatcggtatcggttttaacaacctgttggcttagttttttttttcgcacaacatcacgcgtaatgcattgagttgcggtgtttcccgattaccaaaaccatagccgactttaatgatcgtttgatcgtctgggattggacagaattggtcgacaatcgttttgacaatccccatcccagttggcgtgatcaattcggtctgcaagtctgggttttgtttaattggaatcgcactaccgacgcgcatttgcatcacagcggggactggtacgggcatcatgccatgcgcgactttgataaagccactcccatccgttaattcggatgaatagacttgattaactgccaataattcgagggcgacaaacgctccaacaatatcgacgattgaatcaagcgccccaacttcatgaaaatgaacatcacttaatggtaggtcatgaacgaccgcttctgattgcgcaatttctgtaaaaacttgtttggcgttcgttttaacataatcgcttaaatcactgtgatcgatgatggcttcaatgtcttttaaatgtcggacgtcatcaccatggctgtgcgtgtgtccatttgcgtgttgatgcgtgtgtgcatggccagttgcgtgtgtatgcggatgttgatgctgtgccggtgttgtttcaataaaaccttcatccttgtgcatggcttctggcaaatggacgtcaaaatcggtgccataaatactacttttagcaatccgttctgcatgtaggtggtagccagggacattcaacttagctaattctgtttcaaactgtttgaaatcaacccctaaatcgagcaaagcgccgatgaacatgtccccactaattcctgaaaatgcgtctaaataaagagttctcatttgtcatcctccgtgtcacttaaatgattgatcatacttgctgagtagcccgcaccaaagccgttatcgacattaacgacggtaatcccggacgcacaactattgagcatggtcatcagcgctgttagtccgccaaagttagtgccatagccaatactggttggcacggcaatcaaaggtttttcgatcaacccaccaaccacactggctaaggccccttccataccggcgaccacgatgacaacttgggcttggcgaatttcatccaaatgttcaaacaagcgatgaatgcccgccacaccaacatcatagattcgtttaacttgattaccgtatacttctgcagtgaccgccgcttcttcggccactgccatgtcggaagtccccgctgtgacaacggcgatatagtgatccgtggttggtagtgggtcaaccatcagcactacacattgcgccatttcatagtacattgctgtcggttccgcttcttgaatcgcagcgtacttttctggggaaactcgcgtacataaaatattttcggcatgtcgttttaacgaaccaatgatgccaatgatttggtccgccgttttaccggcgccataaatcacttccggatagccattgcgcttttgccgacttaaatcaaccttggcaaagcctaaatcatcaatggtctgcgcatgtgccagttgctttgttgcttctgtcacactgactttttggtttgcaacagcttctaaaagctgttgtagctcatttgttgtgtccaaactactcattctttctattgttatttcacaataacccctaaaccatcagggatcactgtcactttggcatctgccccttcaatctcgtaggcccgttctaacgctgcatctaaactggttgccaattccatatgcatgtctgtaattaattgtggatcaaccaaatctgacacgaaaatcacatgatgttggaccagaatccgagccaagatttgtgatgtccattgatcagggaccgtttcaagccgtggtgtattgattgcttggtctaagaattctttaggatccttaacgtcagcaatattgtgatagaacccatcaccaccatgcccgtcacgtgcaccagcgaccatgataatcacgccaccttgtttgttcgtcgcttcagcagcagtcatccctttaacggcttggtaaatattttgatcaagtggatagccaccatttgttgaaatggcgatatcacaatcgatcttgtcgacttctgataaactttcaacgaagtcacagccttttttgtgcgctgtttctaaattaccggcgaatgaaccgatgatgtgcttgtcttcatctaaaacaacgttcaagatgaattcaagcccagcttgtttagcggcataaaccatatctttgtggactgggttatgcattaaattcccggttcttgaatagtgggaattgatgaattcacctgagtggttggccataattgttttgtatgaagccacacccggtaaaacagacttccgcccgcctgagaaaccagcgaagaaatgggattcaatgaagccttcagaaatcaataagtcagcttcaacagcgactttattgataatgcaatcgccacctgatggcaattgaccgattttcacaactgagctgtcatcggttgaaacatgcatgacgatttcttcatttgcaacgatttcttcaccatatttgttaaccaattcttcgtgcgttgatggtcgatggaacccagtcgcaactaaaatccgaatccgtgcatctggtgctacagaacgaatccgtcttagtaaaatcggcgtgatgatatgtgaaggaactggtcgtgtatgatcagaactgataatcacgatattctttttccctttagccaactcttctaacttagggctatcaatgggattgtccaatgatttttcaaccgtttcggcttcgctcattggattttgatacgtagcagcttgtgaaacaagcttcccggcaaaattcgcgtctgcaatattagccgtgataattttttgatcgtaaggtaatttaatggctaccaaactataggacttcccttctcaatgctgattgaatgcttttttaaagctacgtccatagttatacagattttctgaaaaggatgcggtataatttatgaacaacatttcattattacttttaggtgtaacaaatgataacaactttatagtcttcaagacgtataatttagattaaagttatttaatgattagcagatataataaatcagcacaaagggtaggcagatgtattatggttttaacagacattgaatttttaattaactttttagaggaacgtcacgtcccagtgattaccaaaaagaagcacacatacttgacgtaccacggtttggaagaacggtatacttatattctgaaaaaaggcgtgattaaaaactcgatcattttacaagacggtcgtgaattcaatctctcttacattacccagccggatgtcatttcacttttacgggatgaaatttcaaaatatacggatcaaccgtttaacgttcgcgttgaaacagaggaagcaactttctatcagattgaccgcgtgaccttctggaactacgtgaatgccacccccgagttacagaattacgttaaaaattactatcgtaaaaaattatccgagaatatttatcgcttgcaaaaaatggtaatgaatggtaaaaacggcgggctgtgtgccttcttatacagcttaattgatctctttggtaagaaacgccgcgatggcatcctgattgacttcgtcgttactaacgaagacattgccggcttctgcggaattagctcgcgcagtagtgtcaatcgcatgctcaaccaactcaaaaaagacggcgtgattgaaaccaccgagcataaattcttaatcaaagatgtcagttacttgcttgataatatcgccaattagcgatttgttaacatatgtaaacatgattcgtgattgaaaacggctatgagacgcgtagccttaatagtcgagaacaaatcagtggaggtttttatgtatgcatattccagataattatttaagtccccaaacgtgtgccgtgcttgcagcggccgctattccagtcattggcttggcactcaagaaagttaaataccaagtcaccgaaaaaaaagaaacggtacccatgttagggatttccgcttcactatcgtttttgatgatgatgtttaacgtgccaattcctggcggtacaaccgcccatgctgttggtgcaaccctattagcgattctcattgggccgtacgccgctagtctagcggtaacgattgcactcatcatgcaggcctttttatttggtgatggtgggattcttgcactcggggccaatattttcaacatggccattatcatgccatttgtcggctatggtctctatcgactattccaaaaagcacaccatcccaaagtgggagtcgtagttggcgcatatctcgggattaatgccgccgcattaatggccggtattgaacttggtctgcaaccgctcgttgcgcataacgcagctggccaacccatgtatgccccttatccgttacacattgcaattccagccatgttgttcgctcatttattagtcgctggttgggttgaagccggctttaccctcgccgtttatcaattcatttgccgggttgcacctaacgaactgttcgttgcaccacgtcaaacagttgatccacaaaccagccgtcgcttacatcacgcgctttacagtttcatcggcctattgactatcttatcgccgattggcctattagctagtggtactgcttggggcgaatggagcgcaagcgaactcgttgcacaactcaaacatgatcacctaggtcacagtctaccaagtagtatggcccatggcttaaactttaatgccctctttagtgactacacagttgctggcgttccactatcacttggctacatcttatcagcggtaacagccgtcattgttttttatcttatcggaaaactggtgatgaatcattattcaacccaatcctaaattaccaacttggcttcaaacaacggaagctacgcccaaaacggtcgcgcaattcgaccgttttttaattcaaaatttgcgctttagtgatcgtttgctgcggcgctttaatcaaacaaaacctcaacctttaatcgcccatcaaacgcctggtattcaactgattagtttattggtgacactcatcattctcgtgttaacccatagtctacttttaatttggttgattggtttattgacgttaattcgaatttgccgcttaccaagccagcatttatggccgctttttaaacgcgtcggtgatatcagtatcattgcgattttattaattctaccgaatttttggctcggccaagtcgccacaacgcttttatttatcgtacggactgaaatcatgttattaaatattgctttctttctcgagacgatcacttggcccgcttttattgttgctttacgtcaattaagactccccagtctgctcattttgacactcgaaattagtctgaaatacagccacttgctcgcccaatttttacaagaatccctctgggcaattcggctacgctcaactggtaaaagccaccaacggcaaaatttagtcggttcactgattggccgcctctacttaagttcccgcaactacattaccgctttatacgatgcgatgattctccggggctacaccggacaagtcacccgacggacgccgctaacagtgaatcgctacgactggcgcttaatcagctgggatctagggctattttgcctattctatttcattcggaggtaatcagatgctgaatttgcaacacattcactacgcctatacgcaaaccgacagccttaacgatatttctcttaccatcgatgcaggcgaggccgtcgcgtttatggggcctaatggttccggaaaatcgacgctgtttaaattaattaacggtttgattcagcccagcgcaggccaatattattttaaagaccaacttgtcgatgcccgcttcctcaaaaagcctgcacaggcgactgccctccaccgcgcaatcggctttgtgttccaaaatagtgacgttcaattatttaacgaaacggtgcgcgccgaactcgcttttggtccagaacagatgggcttagccccagatgaagtgcaaacccgcgttgacgattgcctcgcgttgttacaaatcgaacacttagctgatcgcgtcccttatcaactttccggtggcgaaaaaaaactcgtcgctttgggcagtgtgctaacgatgaatcctgaaataattgtgctcgatgaaccattcaacggcctatcagccgcctaccaaacgctgattatccacttgctccaacaactcaatcaagccggcaaagggattttaattgcaagccacaacctggctcaagtcaaacaagtcgctaaacgggtggtcgtctttaatgaagaccatcaagtgacccatgacttaccactcgcaaaacttgaacaagaaccggaactgcaacgaactttagcattactctaaagagagtgtgttgtagttactgttaatcgcaggcatataactgatagcacaaatatgcggatatcaaaagcggcggatggcacaaaaataatttttgtgtcatccgccgcttttgcattttatattaatcgccttcgatttgtaaccatccctctgtcgcattgaccgtgattgactgtccaatcgggaagtagttcattgctgttataaccaccagtcaccgctaaaatcgctttgacattgtcatctatgaaagcagcgtgcaaatcggcaatccgcgcttcaattggactagaattgaattggtccattaccaagacatgctgcccaaacgtcacctgataaccaagcgcactcaatcgatcattcgccggttgattagccacatatccgccaacactttgcaaactattactaggcgcgatgacccgaatctcatcgccttttgataatcgtttgggcatcatctaaatacactcctttcccatcaccactatgaaacgttcacataaacagtcaattgtcggttcaaatattcggcccacttccgcatactcagccttaaaaaatggctcgtgaactgaacgccaataagcaagcgttcgatcactctcgccctctaaaaaggcatgttcagcgtcgacttgatcatacttaacaatcgtgcacattatcgttttcgtaattgcaaccggccggtctcgtccatctaaaataacattataatcccccacttgtgggacatgctcatcgggttcatacaactcaatcgcagaagtggtggccgttttttgaccgattattaccaatcgtgccaattcattggccatttgttctgtattcccaaatgaataaatctccgctggttgtaaattaggtgataactgttgctgttccgtgaattgttgccaataccgctgcacctctggtgtcattgacatcccctcttccattcgtaacgttgttgttagtttagcagaatttaaccatttaaccaaaaaaagaaacttacccattaggataagtttcttttgatattttatgcccaccgacgcatctttttaagcatcatcggatagcttttaattaggaaccattgtttcatcttaccggttgtttggtcggcacgaatcccagcaatccctttttcaagcatctgttcaaaagtgattgttggttctgtctactgaccatcaacgtaacacagttggcaatactgatttgacttggtgccatcttgttcactaccttggttttgtgcagtcagtggcatgccacaactttgacagaatttttccatgggtggactcctttaacgtgcttttcaaaccatgttcctacgtttagcctaattagccaaacaatcggcttcgccgcttattcgtctaattttgctaatcctcagaacataaccagtttgaacacacttattttcttaacgtgctttcatcaacagtttcctgcgctttgctacacttatcaaatcatcgactatgtcgctaattcgttaagttatgcaaatgctcagaagctaaccgttgatgacgcacttcttttatttaacgtgcttttcaaaccatatgcctgtgcctagcgacacaagtcaaacgattgcttgcagcaatcattcgccttgttggactagtgctcggaatatacccggtttgaacgcacttcttctttaacgagcttgaacgcacccattttatttaatattcttcaagaagttaagcaacattgctgctgatttttggcctgcttctacgatgaattcgtcaaacgttacgccggcttcttcgtcgccgacgtcgctcattgcgcgaatgacaacgaatggaatcttgaattgcgttgcaacttgtccaattgcagcgccttccatttcacaagagagcgcttcggggtaaatttctttgattgccttgattttatcttggctcgcaacaaattgatcaccggtgacaattaaaccaacacgtggttgtatgtcaaccgctttagccgccgcttcgatttgttgaacaatcttagcatcactttcaaatcgttggggttgttgtggtaattgacctggtaagtaaccaaaggcagttgcttctgcatcgtgataagcgacttcgcttgaaatcacgacgtcgccgatatgaaggccttcaccaatcccaccagctgaaccggtattaatcacaacatctggtttttcttcggctaataaaatcgccgtcgtcatcccagcttgcactttaccaattcctgattcaaccaacgtcacttcatgaccgtacaattgacctttataaaaggtattgccagcaaccgtgtgttgttgcacatcttctaattttgttaaaagcgtccgaatttcttcttccatggcgcaaatgacactaattttcatactaattctctccattctaaaaaaacattaactttaccattctataggaaaaaaagaatcaagtaaacgataataattaagccaaaggtaatcccaatcgcccaattcaaccgtttcttcattcgtttaaccgctggtggatcgactttcttagtccgacgcgttgctgtttctggttcgtcttcagtcaccgctttaagggcttctttttgttgttcacgtgcatattcacgttctgtcctgaggcgctcttgatcgcgctgtttaaaggcggcttcttcagcctctttttgttgtcgatattcttcgcgcgtcttaggttcattcgtcatttctaccgctcctattttgcttgtaattgccagtaatacaacgccataatcgttttggcatcacagattaaaccatctgcaacggctgcttgtgcttcttctaacgtcaacttttcgacgttcaagaactcatcgtcatctagcgagcgcttatgcgtgaccggcgttagtgtatcagtgtagtataaagtcattaattcatttgaaaaaccgggtgatgaaaagaaatccgtcacgtgcacgagcttttgcgtcgtcaaacccgtttcttcattcaattcacgtagtgcgacctgatctaagttcttttcacctggatcaatctttccagcaggaatttctaacgtttcacgttgcatgggggcgcgccattgtcgcactaaaaggatgctgttatccgccgtaatcggaataatgccaaccgccccatgatgatagacaatctcgcgacttgcggtttgtccatttggcagtgccacttgttgaacggcaagatcaatgatctggcctttgaataatgtttcttccgagaggaccttttctgtataatccatctgctaatgccacctttaccgtttaatcgctattatacgcgcatttaaaatcgtccgccatcgtcaatgctaaattcaggttcacggccgaattaaaaatccatccttaggcggatactcttttaccttaattcctgttagaatgaaggcatcaattaaatcaggagctgacaattatgtttaaaaaaataacgatttggtgcacaggcatgctcattacacttgtctcaatcccaattttggcaacatgctttgatatttatggtgattgggataatttcatctggttcagccttggtttattattagggctgatctacgttacaatcagccttaaacggcttaaacgacaaccagaatataaaaaagatcagcatatttcaccacaaatgctgaaacactaccaagatgctggcatgagtgatgacgaaattgactttttcagacaaacgatgcaacaagccgaagcgcaaattaaggtacttgcaaccaacatgcaagctcttcctaaattacgggcaatcgatttaaatcacgatacaaccaaggtcagccaatcgctttttcgtgcgattgtgaaagatccaaagcggcttcacaatgctggcgactttttataccggcacttaccatcaatcaatgaactgactagcaaatacatcgaaattaaccatcatgaagtcaagacagccgatacctatctcgttttagataaatcggctgcggcaattgatgcgcttagtcaacagattcaacaagactacgcggatttcgtggccgaagacgtcgatgacttagacacagaagtctccgtcgctcaacaacaaatcaccccagatcacaaggaggaagactaatgtctgaaacgcccaatccaacaaacgatttaatgaatgatttattaaaagatcctttcgaccaaagtgcgccagttgtcactgaggaagcagccccccaggcagaggcctcaattatcaataagctctcccctgaacaacaagcacaggccgaacaattggcacaacaactggacgtcaacgaccaacaagccgtcttgaattacggcgctcaagcccaaaagaaactcggcgctttctcccaaacaatgctcaaccaagtccaaagccaagaaacaggcgaaattggtgacgcattaacgtcattgatgtaccgtttaaacgaagccaatcctgacgaattacgcgccgaagacagcaacgttttcaagcgaatgtttggcaagattaagaagtcggtctatgaaatcactgcgaaatatcaaaaaattggcgcccaaattgatgggattgccgttaaattggacaaagaaaaaaatgcattaatgcgcgacaatgagacgcttgaaacgttgtatgcgaagaataaagcctacttcgatgcactcaatatttatattgctgctggtcagttgaagattcaagaattagaaacaacgacgattccagaagccatggaacgcgccaaaaatgacgataatcaaatggtcgtgcaagaagttaatgatctcaatcaattcaagaaccgcttggaaaaacgaacttatgatttagaattagcacggcaaatcacgttgcaacaagcaccacagattcgcttgattcaaaataccaaccaagcattagctgaaaagattcaggcttccattaacacggcgattccactctggaaaaaccaagttgccatcgccctcaccctgctccgtcaaaaagatgcggtcactgcacaacgacaagtgtctgaaacgaccaatgacctcttgaagaaaaatagtgcgatgttgaagatgtcttcaatcgaaaccgccaaagaaaatgaacgcggcgtcgttgatatcgaaaccttacagaaaacacaaaatgatcttgttgaaaccttacaagaaaccctcaagattcaacaagaaggccgcgaaaaacgccaagtggctgaaaaagaactcaaccacatggaaaatgatctgcgcgaacacttattggcctatacccaaggtcaaaccgctgctaacagcggaccaaaagaagttaattaaatccacaaaaatagcgccgcccatctttttgatgagcggcgctatttttgaatagttaagctattttgcgatgtttcaacatccgccaaccggttagagccgttgcgattaaacaaatcactagcgcaaccataaaggcatcatgcatcccagcgatgaacacattcgcgtgacctggaatataccccgtcactttttgcccgtaattgcgactcattgcggcatataaaaccgtcgttgacaatgaaatcccaaagaccatcccaagattccgcgcgagggcgttaatcccgccagcaatccctagatcttcaacaccgacggaactcatgacaatcgtgttattcggtgcttggaaaatcccattcccaagcccaactaagccaacgaagaacatgaataaccagatcggtgtttgtagattcatcaacatataaccgacctgactgatcgaaatcaacactaacccgataaaggttaacatttctggcccaattcgatccgagatactcccggcaatcggtgcgaccaccacttgaacaattgggaaaatcattaaactgtaaccggcaagattaggcgctaagcctagcgcattttccagatagaatggtgaaatcacattgaagaagaagttaacgatgaaaattaagaacgcacagagtaaactcaaactaaaatcgatatttttaaacaatctaaacgataataatggctgttctacatgttgttcaatccaaacagagatgccagcactaattaaggcaacgacaaaggccgctaaaataattggtgaggtaaatccaatttgttggccgatgaaaatgccgaggaataaactaacaattaaaactacaaaactggcaaacccagcatagtcaattttttcatgtgttttaacaatatccttcggtaaaataaaatgcccaaaaataatggttaaaattccaattggcacgttaatccagaaaatatagccccaactaaaatgcgctaagattagcccaccaatcccgggcccggcaatgctacctaacgcaacgaatgatccggttaaccccaacgctcgcccacgctctttcagtgggaaaacctcggtaataatcccattattattgctcatcgtcattgatgcccctaaagcctgaagaacgcgtgcacctaataacaatggtaagccgccattaaagccacacaacaaggaaccaatcacgaataagaaggttccaattttaaacactttgaccttcccaaaagcatcgccaattttaccgaataataataataaggcacaaatcataatcagataaatcgacacaatccattccgcttgattcatcggaatctttaaatcacggctcatgactggaagtgcaatattaacgatactgccatcaagcgtcgacatgaaggtaaatagtccgacagccgtcaatattcgccaacgatttttttgaacctgcggattatccacataacttaatgccatctgtgagtcactttctttcttttaagtttactccgtctattataccgtggttttagttaattttaattatatcacacaacttatcgcctgtcaacaactatttttaattaattattacttagaagttataactccttaagcaacatataatatgttatcatgttttcaattaaataacaagtgtttttcaaaactttttatttaattgacgatactgcttatcactaatcagctcgcttttgacaactttattagtataccaacttgcaacccgtgatgcaaggattttctgtaaataaataataattatcttataacaataaaaaaaggcccttagctatactaggggccttcgtttttctactattaagcgtagaggtttttaacttgtttttgtaattccggatgtgctaagaactcatcatagttcgtttcagcacgttcgacaacaccgttcgctgatacttcaatgatatgatctgcaattgtttgaataaactgatgatcatgcgatgtaaagactaaagcacccttgaaatcgatcaaagcatcattcaatgaagtaattgattccaagtccaaatggttggttggatcatctaatagtaaagtattcgatttttgcaacataatcttcgatagaatacaacgcactttttcgccaccagaaaggacattgatttcttttgtgacttcatctccagagaaaagcatcttgcctaagaaaccacgtaagaaagtattgtcatcttcacccttagcggcaaattgacgtaaccagtctaagatgatgagttgatcatcattgaaggctgagttcgtatctcttggtaagtatgattgttgacttgtcacaccccaggtaactgtcccagtatctggctgcacttcacctgctaagatttgcattaagacagctgtcgcaacgtcatttcgtgaaacgattgctgctttttcgtctggcttaactgaaaagctgatgttatctaacactttaacaccgtcgattgtttttgaaacattctcaacccgtaaaagatcattccccaattcacgttcgaaatcgaacttaatgaatgggtattgacgtgaagagggttggatatcttctaatgtaatcttttctaattgtttcttacgagaagtggcttgttttgattttgaagcattggcactaaaacgcgcgataaaatcttgtaattctttgatttgttcttcttttttagcgttaacgtttgattgtaacttagcggctaacttacttgattctaaccagaagtcatagttcccaacgaatgtcttgatgcgaccgaagtccacatcacacatcattgtacagacttggtttaagaagtaacggtcatgggaaacaacaatcacgatgttcgggaagtctgctaagaaatcttctaaccattcaactgaggcactgtccaacccattcgttggttcatctaataataggatatcaggtttgccaaagagcgcttgaccaagtaaaaccttaatcttttgcccttccatcaattcactcatcttcacatggtgtaaagattcatcaatccctaaggcttgaagtaattgagcagcttctgattcagcatcccaaccattcatttcagcgaattcagcttctaaatcagcagctttcatcccatcttcttcagtgaaatcagctttagcatatagggcatccttagcttgcatcacttcatacaacttcttatgaccttgaatcacagtctctaacacttcaaattcttcaaaagcgtagtgatcttggttcaaactcgacatccgttcattagggcccattgagatatggcctgatgatggttgtaatttaccttctaataattttagaaaagttgacttacctgcaccattggcaccgatcacgccataacaattcccaggtgtaaacttcaaattaacgtcttcatataacttacgcccagaaagcgttaagctcatttcactaacagttatcacttgattccctcacttttctttcatgactctaaaaagccaaccgtttcatgtgaaacggctggctttctaccattgacaatatatgcttaactctaacatatctaatgactagttatcaaccaggctatttgaccttagcaatcttaccttgttgaatatagacacttagaatcccgatatcggctgggttgaccccaccaatccgactggcttgcgcaagtgtttcgggttgaattttttgtaatttttgacgaccttctgttgcaaggccttcaattgcatcgtaatcgatattggctggaatctttttagcttccattcgttttaacttcgcaattttagctttttccttatcgatgtaacccgcgtatttgatttgaatttcaacttgttccacaacgcggttatcaatgccttcgactgctggaataaattggattaaatcagcatactttacttctggccgttttaagaagtcgctggctaaaacaccatctttaagtggtgcctcacccttagccgctaaaaaggcttggatttctggggttggtttcaagcgaatggttgctaaacgtgctaattcagcttcaacggctgcttttttcacttcatagctgtcaaagcgatcatcattgattaagcctaatgcatgacccttttctgttaagcgtaaatccgcattatcgtgacgaagcatcaaacggtattccgcacgtgaggttaatagccgataaggttccttcgtcccctttgtgaccaagtcatcgattaagaccccgatgtaagcttcactgcggtccaagatgaatgggtcgcggcccgtttgcttcagagcagcgttgatgccggccatcaagccttgaccagccgcttcttcatatcctgaagtgccgttcatttgaccggctgtataaagattttcaaccactttggtttcaagggttggttttagttgccatggttcaacgacatcatattcaatcgcataaccaggacgcatcatttgggcattttctaagccttcaatcgaatgaatcattttgtgttggatttcttctggcattgaggttgagaaatcaccgacgtaatattcttctgtttcgcggccttctggctccaagaaaatttggtgccgaggcttatccgcgaagcggacgattttatcttcaattgaagggcaataacgtggacccaccccttcaattacgccggtaaacattggggcgcggtcgagattgtcgcgaatcacttgatgcgtcgtatcattcgtgtatgtcatccaacaagaaagttggtctttcaaataagcactatcaggtgtttcgaaactaaagtggtttggttccttatcccctggttgttcttccgtctttgaaaagtcgatcgtggtgccgtccacgcgtggtggggtccccgttttaaaacgcgtgaggacaaatccgttgtcttccaaactttcagaaagtttaatagaaggaattgaattattcggaccagatgaataggttaattcgccgataataatcttaccccgagaagctgtcccagccgttaagatcacactatcagcgctgtaacgggcaccagtgttagtgacaatccctttgcagacaccgtcttcaacaatcaatgattcagcaatcccttgacgaagtgttaagtgctccgtcgtttcgatagtccgtttcattgtccggtgataagcgtgcttgtcagcttgggcgcgtaacgcgcggacagctggccctttacctgtattcaacatccgcatttgaatgtatgttttatcaatattgcggcccatttgaccacccaaggcgtcaatttcacggacgacaatccctttagcaggaccacccaatgatgggttacatggcataaaagccaccatgtctaagttaatcgttaatagtaatgtttcgcggcccattcgtgcagcagctaaagccgcttcagaacctgcatggccggcaccaacaacaatcacgtcgtagtgcgctgcgtcatattctcgcatattttgttctcctttaatatggttcaagacctatttacctaaacagaattggctaaagagttccgtaatcaattcatctggtgctgaatccccggtaatctcaccgagcttatcccaacagttggtcatatcaatttgcacaaggtcaactggcatcccagctgcaattccactgatgacttcatctaatgattgttgtgcttggtttaatagaccaatttggcgggcattagtaatcatgaccgtactttgactattttcaatcccaccgaagaagagtttggcgatttgggcttccaaatcggtcaccccttcgcttgttaaaattgaagtttgaattacttcatccgcattcaccaatgtttggagttcatttaagtctaacaagttcggtaaatcggttttatttaaaataatgatccgtttcttatcagtggtggccgtgattaactcgcgatcttcaaccgttagtggttcactttgatttaaaactaataaaatcaggtcagccttggtaattgctgcgcgacttctttcgaccccaatcttttctaccttatcttcggtatcatgaattcctgccgtatcaacaagcttcagcggtaccccacggacgttgacatattcttccaaaacatcacgcgtcgtcccggcaacatccgtcacaatcgccttatcttcatgtaataggtgattcaacaaacttgatttaccaacattgggccgtccgacaatggccgttgctaggccttcacgtaagacttttccttgttgtgccgtttgaagtagttcaccaatccgcgctttcacaagttcggctttttcaagtagaatccgcgtcgtcatttcatcggtatcatattcgggatagtcaatgttgacttcaacttgcgccaatacttctaagatttcttggcgtaaattcttaatcaggtgcgttaaactcccatctaattgatcaacagcaacttgcatcgcccgatcagtcttagcccgaatcagatccatcacagattcagcttgggttaaatcaatccgcccatttaaaaaggctcgtttcgtgaattcacccggttcggccattcgtgcaccatagctcattaataattgtaagatgcggttcgttgcgacaattccgccatgacaattaatctcaatcacatcttcgcgggtaaacgttttgggtgcgcgcatgacagacaccatgacttcatcgactactgcgtcggttttaggatcgataatgtgcccataattaatggtatggctcgccacttgatcaagatctttgccgcgataaacgcgtttaataatggctaaactctcatcccctgaaagacgcacaattgaaattgccccctcaccaggtggtgttgaaatcgccgtaatcgtatcaaattctgtgactgtcgttggcattttaaatgcttcctttccgaaatagctgcataaaaaaagcgcttagcgtccacccctcccgtcattgcgtaaggggtggacaaagcactttcactactttatcgatatttaattagtttcattatacacgatttttttagagcgtcaattcacaacacctaaaatgtgcgcgctaattccaccacaattgaccggcgatcgccttggccttctgaatgagtttgaacatggtgattagttgctaaatgcccatgcacaattttgcgttcaaaagccggcattggttctaaaaagactggtttgccggtcgcaacgacttcacgggctgctttatcggcaaggtggctgacaatcgctgctcttcgctgccgataatcaccaacttctaggataatggtttgcttgcccttcatatgatgatcaaagtaagtctgcgctaaatattggagcgcattaattgtcttaccatgcttaccaatcaacaagccttctttatcggtcttcaaatgataagtcgtactccgatggtcgtgagttacatgaatgctgaccggtgtgccaatttgagccgtgatggcttccaaataggcgcttaactcagcttccgtttccgcaccacttttccgcttttgcggcgtactagttaaattatttgttggcattggttcaactagctcttgaactggggctggggcgctttgtttaacttggcttggttgttcatttggcgttagccggacaactgctaagcggcgaccaaaaccgagaaacccttttttgccggcttccaatacatcaacggacacttcctcacgcgttagatgcatggcttgcaacccttcatttaccgctgcttgaatatcgctaccttcatatgttggcatttcaaaacctccgatcaatttggtcactccaactagtgtgagcgcccgattctcgtttattataccatgatataccaatttaaaaatagcatgtcattatctgagatagtccgccgtcaaagctaggaattgttgtacatctttagcgatgctatccgcggcagcttgccagaaatccggttgggttaaatcaaccccaagatgtttttgcgctaatgcttcagtcgacatattggccgtatcacgtaatagtgcgatatagtccgcttcaaaatcaggcattgtctgtgccttggcataaatccccatcgaaaaaagatagccaaacgtataagggaagttataaaacggcacgtcatcgaagaagaaatgctgtttgtccgcccagaatagcggatcataatcagtcaacgcatccgcataggcttctttttgagcggctagcatgagtgcttttaaatcagctgttgtttgcaggccattttggcgcgctgtataaaaatgtcgctcgaataaaaaccgtgcgtgaatattcataaacatatcaattgcgttagtaattttctgatccaataaattaatcttcgctgctgggctttgcgctgctttaacagtcgcatcactgacgattagttcagcaaaagtggaagctgtttccgcgacgttcatcgcatagtcttgtcgccaacttggtaaatcattaatcatcattgtatggaacccatgccctaattcatgtgccaaagttgcaacaccattgggggtgccatcaaatgtcataaaaatccgaaaatcatccgtttcaggtaaatcagtcatataaccacctggttgtttgcctggccgatcttcagcttcaatccaacgcttttcaaacgcggtttgtgccaccgaagccatcttgggactgaacgctttaaagttctgcatgataaaatccgctgcttcatcataagaataacgctgcggttgaaaatcacctacaaccactggtgcccaggtatcataccaagcaagctgttctttgcccattaacgctgccttccgatttagaaaatcgacaagcggcgctttattttgactaacgatcgaccacatcgcttctaacgttgcgggttgcatgcgactcgttgccaatggctttttcaaaaagtccgttgtgccatgtgcttgataatccgttaggcggaagccagccaaatgatttaacgtatccgttaataatggtgaataccgatcccaagtctggtaccaattttgaaagacgcgttggcgtaccttgggatctggatcagattcaaatttattctgcgcttgtcccgccgataaagtcgtctcaccatcggggacttgaatttcagcaaccaatgagtcgtaatgatcactccatccagttaaaccatctaacgcgaactggttaattagtttttccgtcgcttcatccaaaagttcagcaccattcgtccgtttttcggttagattaaactgaatcgcttgtaaggcaggtgtcgatacaacggttttaaaatctgcgtctgacattgcgaccaatttttttgtgagtgcgacatcaatctgattcgcatcattttcaagcgcattaatccgccccatcatcggtgcaacttgcggattgcgttcatccgttgattgaatcatattcacgaaactccccgtttgcttgagacccgcttcaatcgcttgtaactgttcagtgatttgcgttagcgttgcaaatgttggctgatctgtcgcaaacgtccagttctggaccgcttctaataagggcgtcatttgtgcagtcaaatccgccaatcgttgcgtcaacgctggtgaatcaatccccccggcaaaaatcggttctaaatcccattgttctgaataggtcatctctttatcctccacttttaaacgattgcacttattatagcgaaatttcgcgcaaagcgcgattaattcaaccagatccactagacattttgataatatctgttaaattaggaatgtaagcagatacatagctgctagaaaggcgatgtttatgatgacgattgaacaagtacccgctaatacaatcgcagatttaaaaacactgttaaaaacgacccaagtgcccgataaaattatggcaatgggacccgaactgatccaatacttaacccatattaaggcgagtcaattatcagacaccgaccatcttgggttcgatttagggagtgccggcattttaacgttaatcgagcaagtcaatacagcctttttcgatcacttccatatgtttgacgatgctgcaccgattgaaccaaagttaacgcgtaaaattctagtgctttatcatctaaaaccgattgatgatcagcacttcctccttcatttgaaacaattagactattaaacagcaaaaaatcgtaaccaaatcggttacgatttttttattcttaaagatttttgaatgattattagtcttgaaattagttatcgattattaccaatcatgatgctactataaaattaagaaaacggtttaaaaccaattttaacaatttatctatctgaatttctattttttaatctagcgctatggaggattagccattgaaactatttctttttatattaacaacactcctttatttgctattagattatttaatgctaacctttccacctgtcgaaggggtggctcagaatgttcccctcatccttttaccattctgttattttttggatcccgattcttgctgagaaaaacaacgattaaccgccataaaagcgggttacttattggtgccgtttgtgtcgtctgcgctatcgcaattcctcttgtacttgctgcctattacctattctaaaaaagaccaatcataatgaaaattcattatgattggtcttttaattttggaaattaacgtttcttagttgctttcttacgtgctttagcaagtgctttttcacgatcacgcttttctttttccttggcttcgcgttcgcggcgaatcttaaatggattttgaatcaccattgtttgacccactgaaaaggcgttcgttaccacccagtaaattgaaacagcagacgcgatgttcatggccatcacaaaaatcatgattggcatcacccacaacattgcggatgacgcagcattcttcgtgggttgcgacatcattgttagatacgatgttgcaaatgtaaagatcgcagccaagatagccataataaagtaaggatcagctttcccaagttgcatccataagaacgtcccactctttaaagcagctgttcgatagattgcttggtacaaggcaatcaacactggcatttgaaccactagtggtaaacagcccacaactggattgacgcccgcttcagcatatagcttttgcgtttcttcgcgtaacttctgttgtgtctcagcatctttagaagcatatttcttttgaagtgcttgaatttctggtgcaacttcttgttgtttgagcatgctcttactttgccaccaagttaatggcaagataatcacccgaatgatgatggtgaaggccacaattgcccaaccataactgccaccaaagatgtctgctaaccataaaataaagcgggaaaagttataaataacataatgatcccagaagccagtactgctactatcaactggtgatgtactacaccccgctgcgattagcatgaacaagaatagactggccactaataatagccgcttgcgattttttgaactcactgtaatccctcacttattcagaagcagaatctgcttcttcctttaatagctttgctagttttaagacgtgcattaaattctgtttggtttccgccattgttagttggttagcgccacgtcttgcgatcactaaaaagtcgacagtctgtggtaactctggcttcaactccaacaagctctggcgaatgtaacgtttaacctgattacgcatcactgcgttacccacttttttacctacggacaggcccacccgaaaatgcttttgaccaggtttttctaattgataaaccacaaaattgcggttggcaactgaatgacctgcttcaaaaaccgtttggaaatcctgttcttttttgacgcggtacgactttctcataattcactccggcatttcatttaattaattgaggataataaaaaaaccactgaagcatcagtggcctatgcagataatacttttctgcctttagcacggcgtcttgcaagtaccttgcgaccgttcttagtattcatacgtttcatgaaaccatgaacacgttctttatggcgtttctttggttggaaagttctctttgtagtcattatactggcacctcctaattgactgtgtctattgttttcatatctgagaaacaacgggtgataaataccacctacgacattcactaaaatataatagcatatttctatagaagttaaaacactttccataaaaaaacagaataaatattcttatccacaaaaaataattcattggctttcttgtggataactgattataccgaatcgtccgatttttgtcacgcacagattacttgctgatttatccagaaaatcacagggtgttactatgttatccacaagctattttcaagctgtgcacaaattgataaaaccttttaatagcaagcatcagatacacacacttttttgtggataagtgcgataatcgtttgttgttttctgttttccacagtccccactaaaagttatccccggtcgtgtgttcaagtggataactttttaattcattcctgtggattttgttcttgttgtggaaaacttttttttagaatgctagaatgtagatagtctttctttattgaactttttttcaataaagtggttattttacgtgaggaggacacgctacatgcctgatcttcaggaactttggaactatttgcgggaagaattccaaaatgatttaacacccgtcggttttaatgcttggattaaaaccgccaaaccgcttgcttttagagccaatgaaatactgatcgaagtgccttctcctttacacaaagagtattgggaaagtaacttggccactaaggtcgttgaaggggcctacgaattcgcagagattgaattgacccctatttttctgttacctaccgaagccgagcagcttcaagctgaaaaaccagctgaagaacgcagcctcaccaaagctgaaaccccaacctttttacgtgaaacgcatttaaatagtaaatacacgttcgacacgtttgtgactgggaaaggcaatcagatggcccacgctgcagcactcgttgtttcagaagaacccggtgttttatataatccactttttttatacggtggagttggtttaggtaaaacccatttgatgcaagctatcggtcaccagctgttactctctaaacctgacacgaacgtcaagtatgtgacgagtgaagcttttgccaacgacttcatcaattcgattcaaacgaagaatcaagaaaaattccgccaagaataccgaaacgttgatttattattggtcgatgatattcaattttttgcggataaagaagggactcaggaagagtttttccataccttcaatgatctctacaatgataaaaagcaaattgtcttaacatctgatcgtttacctaatgaaattcctaagctccaagaacgcttagtttcacggtttaaatggggcttgtccgtcgacattacgccgcctgatctggaaactcgaattgctattttacggaacaaagccgacacagaacgcctcgaaatcccagaagatactttgagctacatcgctggtcaaattgattccaacgtccgtgaacttgaaggttcactggttcgggttcaagcttatgcaaccatgcaaaatgctgaaattacaactagtcttgccgccgatgcccttaaaggcttgaaactcaatgggaagtcgagtcaactttcaattgctaagattcaatccgtagtcgctaagtactacagcctttcaatcactgatttaaaagggcgcaagcgcgttaaagaaattgtgctcccacggcaaatcgctatgtacttggcccgcgaaatgaccgacagttctcttcccaaaattggacaagaatttggcggtaaagatcatacaacagttatgcacgctcatgaacgaattagccaagctttaacgagtgatcaaaatctaaaagatgccatcttagatttgaagaataccttaaaaggctaaatataggctgtggataaacgctaaagttatcctaagagttgttctcaacttatccacaagtggaaaactagacactcttttgcttttctatgttatccacaggttccacaggccctactactattacttaaaattcttttataatatatatatctattttccttcggaggtttaacatccatgaaattctcaattaaccgcaacgtgttcatcaaaacccttaatgatgttcaacgtgccatttcagctaaaacaacgattcctattttgacggggcttaaattagtgctttcgcaagaaggcttaaccttaaccggtagtgatgctgatatttcaattgaagcaacccttgctagtaatgatgaaaagaatcaattagtcgttgaagaagcaggtgccattgttttaccagcccgcttctttagtgaaatcgttaaaaaattacctgaagatcaaatgacgattgctgttggtgacaacttccaaacaaccattcgttcaggtaaatcagaatttacaattaatggcttagatgctaatagttatccacatctacctgaaattgcgggacaaaatccgttcagtatcagtactgatgtgcttaaacaattaattcatcaaaccgtcatcgctgtttctaaccaagaaagtcgcccaatcttaacgggggttcatttggttttaaaagatggcgaaatgttagccgtcgcaacggacagtcatcgacttgcacaacgaaaattaaccgtttcagtaccaagtgatggggactacgatgtcattattcctgggaagagtttaattgaactttcaagaacgttagcagacgaagttgaaaccgttgaaattcggattgctgaaaaccaagtgctctttaaagccggtaacttagccttttattctcggttgttagaaggaaattaccctgacacagcacgtttaattccaacttcttcaagtacacaaatcgaattcaatgcaccggtcttattagctgcgattgaacgggcatcattgttgtctcatgaaagtcggaacaatgttgtccggttgacattgaatacaacggacaacacggcaatcatctacgggaactcaccggacgttgggaatgttgaagaagcccttcaatttgaaaacctaacgggcgaagatctcgaaatttcatttaacccagattatatgaaggatgctttacgttcatttggtcaaacaaccatcgtgattaactttacggcagctttacggccatttacattggtcccaagtgaagatcaagaacactacattcaattaatcacaccagttcggacattttaataatcaaaaaacgccgcatttaaaaatggggcgtttttttttgcgctaaaattaaaataaattcgtttacagcgatttcggataaaacaagtaggataaggttaaagcacttaaaaacgctcagaaagcattttagctgtgtttatttgtttttaaggcaaaaaaagtctataattgtaaggtataacagatcggtattagcgcagtaattaatatcgttaagaatggtgggttgagtatggcacaagaaattaaacttgaagctgagtttgtgacactcgggcaactccttaaagaggccggtgtgattgaaacaggtgggcaagcaaaatggtttttaaaagaaacaacggttttagtgaacggagaacctgatgatcgtcgcggccggaagttatatctggaagacgtcgttgaggtgcccgataacggccagtttgtcattaaacaacaagaaagattgtaggcgactatgtatttaagtgaactccaacttgatcattatcggaattacgagcaagtggacgtccatttctcgccagatatcaatgtcttgattggtgaaaatgcgcagggcaaaacgaacttgctagaagccatctatgtgttggctttggctcgttcgcatcggacgaataatgatcgtgaactgatacaatgggatggcgaattcgcaaagattaccggcttggtacaacggcaaactggccacacaccattagaattggtggtcagtcaaaaaggtaaaaaagcgaaggtcaatcatttagaacaggctaagttatcccaatatatcggtcaattgaatgtcgtcttgtttgcaccggaggatttgaatatcgtgaaaggctcgccagctgtccgacgacgctttatcgatatggaattcggtcaaatgagtgcgaagtacctgtataacatttcgcaatacaagtcgattttgaaacagcggaatcagtatttgaagcaactacaacgacgtcaagctaaagatttagtgtatttaggcgtattgtccgaccagttagccgcttatggcgcggaagtcacggttgctcgccgtgaatttctgcaacagatggagaagtgggcgcagaagttgcatcaagagattaccaaagagcgggaagttttgacgtttaaataccaaagtcagattccagatgagcagttggtacttgatgccgaaggtttataccaacagtttcaaaccctatacgagtcgcaccaaacacgggaagtcgaacagggcacgacattggttggcccgcaccgcgacgacgtgttatttttggttaacggtaaggacgtgcaatcgtttggctctcaaggccaacagcgcacaaccgcgttaagtgttaaattggcggaaattgacctaatgaaggaacaaaccggtgaatatcccgtcctattactggacgatgtgttgtccgagcttgacgatttacgccaaacacacttattgaaaacgttccagaataaggtgcagacgttcttaacgacaactagtcttgaaaatgtcaaaaaagaaattattagtgcgccacgggtgtttaccgtgataaacggcaccgtgacagtggccgatgcagcagcaaattagtcaaaaaacgatcaaacggaggtttttttcttggcagatgatcaaatgaatcaagagacagaagcacaaatggaagcaaaagaagaacgcgctaaatcttatgatgccagtcaaattcaggtgttagaaggcctagaagccgttcgtaaacgaccagggatgtacattgggacaacgagttcccaagggttgcatcatttggtttgggaaattattgataatgggattgatgaagcactcgctggttttgcaacagaaatcaacgtggttgttgaacccgataatagtattacagttacagatgatgggcgtgggattccagttgggattcaagctaagactggtaagtctgcgctcgaaaccgtctttacaatcttgcatgccggtggaaaattcggcggcggcggatacaaagtatctggtgggttgcatggtgttggggcttcggtcgttaatgccttgtcaacggaattagatgcggttgttactcaaggcggtaaacgctactacatcgatttcaagcgggggaaagtgcaaacgccaatgaagatgattggtgacgcaccagcccatgaacatggtacgaaagttcattttgtccctgatgctgatatctttactgaaacaacggtgtatgatgataaaattttaacaacgcggattcgggaattggccttcttaaacaaaggcttgaagttaacgttcaccgacaaacgggctgaaacacatgaaaaacttgaattccactatgaaggtgggattaagagttacgttgaatatttagacgacaaaaaagagacccttttagacgaaccaatctatgttgaaggtgaacaaaacgggattaccgtggaagttgctttgcaatatacgaatgattatcggacgaacttgatgacctttgccaataacattcatacctacgaaggtgggactcatgaatctggctttaagacggcgctcacgcgggttattaatgactacgcaaccaagcaaaacatcttaaaagccaacgacacgaacctctctggggaagatgtgcgtgaaggcttaacagcggttgtctcggttaaacatccggatcctcaatttgaaggtcaaacgaagacgaaattaggcaatgccgacgcacggacggtgactgatcggatgttctctgatcatttcacgaagttcttgatggaaaacccatcgattgcccgccaaattgtcgacaaaggctcattggctgccaaagcccggttagctgctaaacgcgctcgtgaagtgacacggaagaagaacggtcttgaaatctcaaacttgccaggtaagttggccgataatagtagtaaagatcctgctatttcagaattattcatcgtcgaaggggattccgctgggggttcagcaaaatcaggccgttcacgtttaacgcaagccatcttgccaattcgggggaaaatcctgaatgttgaaaaagctagcatggaaaaaattttggcgaatgatgaaatccggaccttatttacagcaatgggcactggttttggccaagaattcgatgtggctaaagcccgttatcataagttgatcatcatgaccgatgccgatgtcgatggtgcgcatattcggacgttgcttttaacgttgttctaccgttacatgcgaccaatcgtcgaagcgggttacgtgtatatcgcacaaccacctttgtaccgtgttaaacaagggaagatgatgcgctatattgattctgatgaagaattacaagaagtgttagggacgctccaaccaagtcctaaacctgaagtgcaacgttacaaagggttaggggaaatggatgctagccaattatgggaaacaaccatggatcctgaaaaccggcgcatgttgcgggttaacgttgaagatgccgaagaagcggatcaaatttttgaaatgttaatgggcgatcgggttgaacctcgtcggattttcattgaagaaaatgccgtttacatggatccaaagagcatcgatgcatagcgtgttcgccgcttaaacggacacattgaaagactgactgagaggggtttatagattaatggcaaacgaaattggccaagacggtcggattgaaaacgtcaatttatctaagacaatgcgtaaatcattcctggaatatgcaatgagtgtcattgttgcgcgtgccttaccagacgttcgtgatgggttaaaacctgttcaacgccgaattttatacggaatgaatgaattagggatcactcccgaaaagccttacaagaaatctgccagaattgttggggatgttatggggaagtaccatccacatggtgattcagcgatttatgaagcaatggtgcggatggcacaagattttagttatcgttacatgttagtggatggtcatgggaatttcggctctgtcgatggtgatggtgctgccgcaatgcggtacaccgaagctcggatgagcaagatggctgtcgaaatgttacgtgatatcaataagaatacaattgattatgtaccgaattatgatgagtcagaacgcgaacccgctgttttaccagcccgtttcccgaacctactcgtcaacggggcgactgggattgccgttgggatgacaaccaatattccaccgcataatttagccgaagtgattagcgcattacacatcttgatggataatccagatgcgacaaccgctgatttgatggatgccttacctggccctgattttccaactggtgggttagtgatgggtaaatctggtattcgccatgcgtatgaatctggtaaagggacaatcacccttcgcgctaaagtggacgttgaggtccaaaagaacggcaaagaacggattattgtcactgaaattccatacatggttaataaggccaagttggtcgaacggattgctgaattagcccgtgacaaacggcttgaagggattaccgatttaaacgatgaatctgatcgtgatgggatgcgcatcgtaatcgatgtgcgtcgggatatgagtgcttcagttgtcttgaataacctgtacaaattgacaccattacaaacctcattctcatttaatatggtggccatcgtgaatggtgcccctaaagtcttgagtttgaaatcaatcttggaacactacttagtgcaccaagaagaagtcattcgtcggcggactgaatttgatttgaagaaggccgaagcgcgggcgcacattttagctgggttacgcattgctttagaccatatcgatgcgattattcagatcattcgtggttcgaatacaggtgatgccgctaaggtcttgttgatggatcgttatgatttatcggataaacaagcgcaagccatcttggatatgcgtttagttcgattaaccggtttggaacgtgataaagtcgaaaatgaatacaataatttgatgactttaattgctgatttgaaagatattttagccaaaccagaacgcattaagaagattatctacgatgaattgcttgaactccaaagtaaattcggtgacaaacgccggacagaattattggtgggtgaagtgcttagtcttgaagacgaagacttaatcgaagaagaagacgttgtgattgcattaacgcataacggctacattaaacgattaccagccagcgaattcaaagttcaaaatcgtggtggtcgtgggattcaagggatgggcgtccatgatgacgacttcatcgaacacttgctttcgacttcgactcatgaagtgctcttattcttcaccaatactgggaaagtttaccgtgccaaagggtatgaaattccagaatatgggcggactgctaagggaattccaatcattaacttattaggcattaattctgatgaacgcgttcagaccgtggttaatgttggtaaagaagtgcaagacgaacaatcactcttctttattacccgcttagggacggtcaaacggacatccgtttctgaattcgccaatatccgtagcaatgggttgaaagcattgaccttgcgggaagaggatgaattaagtaacgtcttgatgactgatgggcaacaaaatatctttatcgggacccataatggttatgctgtgtcatttagtgagacagctgtccgttcgatggggagaaccgctgctggtgtgcgtgggattcggttacgtgaaggcgactatgtggttggctctgacttactgattccgggtcaagaaatccttgttatctctgaaaaagggtacggcaaacggacaccggttgcagattacccaatcaagggtcgtggtggtaaagggattaagactgccaacattactgaaaagaacggcccattagctgggattgctgccgtcactggagaagaggatattctcttaatcactgatactggcgtcttgattcgtttcaaggtcgctaacgtttcacaaactggccgggccacacttggtgtgcgtttaatccgggtggatgacgaagcgaaggtcgcaacaatggcgaaagtcgaagctgaaccagatgaacctgaaacaccagaagcaacgacggcaccaatagcaccaactgatgacactactgatactggcttagcacaagtcgatgaattactcgcgcgggctgaagccgatcaatcggcatcagatgatcaagattcagaaaattaattaaattaaaaaaataaaaatcgtttctgcgtaaatacacttgtaacaactgttaccaagcgtgttagcagcaacgatttttattttagattgtattttaacggccgttatgatagaattttatcttgtgagtatctgtgatttagacacagggtctaaatcgtgaggctaatttttattagtcagttactccttgttcttacacaggtaagaacctaaagtccataaggaggtgaacagtcatggctcaatcaaaatacgaagttacttacatcatctcaacaacacttgatgaagaaagtaaaacagctcttgtcaaccgttacgacggcatcttaaaagacaacggcgctgaagtgattgattcaaaagactggtcaaaacgtcgtttagcttatgaaatcaacaatcaacacgaaggcatttaccatatcgtaaatgttttagctgataatgatgaagctttaaacgaatttgatcgtctagctaagattgatggctcagtattacgccatatgatcgttaaacgcgaagactaattttgaattgtaattattgaatagaggggagctgacagaatgattaatcgagttgtactcgttggtcggctaacacgcgatgttgacttacgttacacttctagtggtgctgctgttgggactttctcaatcgcagtgaaccgtcaattcacgaatgccaatggtgatcgtgaagcagactttatcaactgtgtcatctggcgtaaatcagcggaaaatttcgctaatttcactaagaaaggctcactagtcggagttgatggccgtctacaaacgagaaattatgaaaaccaacaaggtcaacgtgtatacgtaaccgaagtggtcgttgataacttctcattgttagaatcacggacaacaacggagcaacggcaaggggatggcgcaagccaaaactttaacaacaatcaaagcaatggtagccaacaatctggatttaccagccctcaacaatcgggtaatccatcagctgcaaataacactcaagccgatccatttgcaaataatggtcaagcaattgatatttcagatgatgatttacctttctaaaataaactgttttggaaggaggaactttcaatggctcaacaaagaagaggcggcaaccgtcgtcgtcgtaaggttgatttcatcgctgctaaccacatcgaatatatcgactacaaagacactgatttattgaaacgttttatctcagaacgcggtaagattttacctcgtcgggtatctggtacaagtgctaaaaaccaacgtcgtttgacaattgcaatcaaacgcgcacggattatgggcttattaccattcgttacagaagactaatcagtcaaccaaaagacctgctaaacactgtttagcaggtctttttttgtgcgctttaataggggaacatgggattaaattacgggttcaaagcggtaattgtagggcaattgtgctaaaataaaagtagtattttttaagttttagtaaagaaccacatagactcaatgatagatgaacaagaatcagaatgggatctagaattaaggagtttacatgaaaaataagtttaaacaattaaaattaccacagtttttagatgatactcgcctgcggaccgttgccctgattttgttgggccttacagcggttagtttggtatttgctgcgatgttagattggctaattgctctaattttattcgtgctgctaatcgggacggtcattactgtgctatacgcgatcgaaacggtcactgagaatacagccaagtatgtctcggacttgtcgtaccgcattaagcgcggcgagcaagaggctttaattaagatgccaattgggattttattgtacaacgaatcaggtgagattcaatggacgaatccttatttacagcaatatttcggtaataaagaagttttaggcaaaaagattaagtctgtcgatccagagttggcagaattagtcgcacaaaatgaagatgctaatgaaacaaaaattgttcgttggggcgataatcaattccaaatcattatccaagaaagcattggggtggtttatcttctcgatattacacgctatgcggccattgaagatcgttatgaagatgagcaagtagccatcgggcaagtgttcttagataattatgatgaaatcactcagacaatggatgatcaatctgtttctaatctgaataactatgtcaccaacgagttatcacgctgggcgaatcagtttcagatgttcttgaagcgagttgatgatgatcatttctttgttttggcgtacgccaaatcattacacgccgctgaacaagagaagtttaagattttagatgaaattcgagaagaaacatccaaacaaaacttcccactaacgttgagtgttgggtttgcttatggggaatccgatttagccgttctagcaacaacttcacagagcaatttggatcttgccctcggtcgtggtggtgaccaagtcgttgtcaaagcgagtgaaggacaagcacgtttttatggtggtaagactaatccgatggaaaaacggacgcgggttcgtgcacggatgatttcacaagccttacaagaaatcttcaaacaagttgacgaagtctttgttatgggccatattcggccagatatggatgcattgggcgcctcatttgggattcgccggattgccgagatgaacggtaagaagtgctacgtggtcgttgaccaaaacaatattcatacagatattcaacgtcttttagaggaagttaaagcctaccctgaaattgcagtggaagtgttgtcgcctgaagaagcgctcgaaaaagcaacggccaatagtttattagtgatggtcgatcattctaaaccatccataacaatggcgcctaagttgtacgagaagcttgctcagcggacgattgtcatcgatcaccatcgtcgtggggaagagttcccagaaaacccaatgttggtttatatcgagccctacgcctcttcaacgtgtgagttagtgacggaaatgtttgagtatcaaccacaaaatgtcgctaatattaacaagttcgaagccacaacgatgttggctgggattacggttgatacgcagtcattttcaatgcgaactgggacgcgaacgtttgacgcagctagttatttacgttcagttggggctgatgcttcgatggttcaacacttgttaaaagaaaatgtcgataattatattcaaaagaatcatttaattgaaaccattgaaatggttgagccaaatatggcattatgtatgggtgaggacaaccgtacctacgatccggtcatcgcagcacaagcagcggataccttgctgtcattgtcagacattgaagcctcgtttgtcattgtgaaacgcccagatggcatgattgccatttcagcgcggagtctaggtgatgtgaatgtgcaagtgattatggagaaattaggtggcggtggtcatctttccaatgcggcaacgcagatggcagatacgactgtttccgaagccaaggcgaagttattaacggttttggcagagctatttgatccggaaacggacaaggaagcaacaaacgattaattagataaggtggtcagaacaatgaaagttattttcttagaagatgtacgcggtaaaggtaaaaaaggccaagtgaaagatgtgccagatggttacgcacaaaactttttaattaaaaatgggaaagcaaaacccgcaacatcagctgctatcagtgctttaaaaggccaacaacatgctgaagctaaaaatgcagctgctgaattagcggaagcaaaggttttaaaagccaaaattgaagacgataaaacaatcgttgaaatcaaatctaaagcgggcgaagacagccgcttatttggttcaattccaagcaagcaaattgcccaagcattggctcaacaatatcagatcaatgttgataaacggaaaattgatttaccagaaccaatcaaagcgttgggttaccggaatgttgatgtacggattcaccctgatgtaacagctacgattcgtgtgcatatcgtaaccgaataataaaatgaatgattgaaaagaccgtgattagcaccactatcacggctttttttattgctgaccaatcggtgactgttgccagtcactggtattttgagtaaactagtgagtaattgaagtcgattaaccaaaggagtaaaaatggtgaataatgaactaattgaacaagtaccgccgcagaataatgaggcggaacaggccgttttaggggccgtctttattagtggcgatgcgctcgttgaagcaatggaatacgttactgccgacgatttttatcgtaaagcccaccgtttgatcttcgagacgatggttgaattaaacgaacggggtgaaggaatcgatgcggtgactttaaagagtgccctcgatgcgcagaaccaattggaagatatcggtggtattggttatttagctgagttggctgaggctgtaccaacggcagccaacgtagtttattatgccaagattgtctctgaaaaagcaatgctgcgccgtttaatccaaaccgctcaaaatattgtggcaaagggttacgcgcaagatgaagacgtcacggatattttagataccgctgaaaaggaaatcatggatgtttccgaacggcaaaataaggccgggttcaaatcaatttcagatgtcttaacgagttcaattgaacaaattgataagttatatcaaaatgaagaagacattacgggtctatcaacgggataccgcgatttagataagattactgcgggtttgcatgaagatgaactcattattttagcggcccggcccggggtggggaaaaccgcgtttgtcttaaacattgctcagaatatcgggacgaaaaccaatgagaatattgcaatttttagtttggaaatgggtgctgaacaactcgttaaccggatgttgtgtgcagaaggaagtattgacgccaaccatctaagaaccgggcaactcgacgaacttgaatggcagaatctaatcgtagccatggggagcctttcaaaagcgaatatctatattgatgatacgcccggcgtgaaaatggcggaaattcgggcgaaatgtcggcgcttagcgaaggaaaaagggggcgttggcttaatcgtcattgattacttgcaactaattgaaggttccggccaagaaaaccggcaacaagaagtctcggcgatttcacgtcaattaaagaaattggctaaagaattacgggtaccggtcattgcgctctctcaactctctcgtggggttgaacaacgacaagataaacgcccagtcctttcagatattcgtgaatcaggatcaatcgaacaagatgctgatatcgttgctttcttatatcgtgatgattactatcgcgatgaacctagggaagatggcgatgatttcggtggtggcaatccgccagcaccagcgccacagcagtcagatgatgcggacgttggagaagttgaagtgattatcgaaaaaaaccgtgcgggtgcacgagggacagtcaaattattatttgtcaaaacgtttaataagttctcatcaatttcgtatgcggaccaatagtaatgactatttttaataaatagtgaatattatcgtaaatgaaatacttaaaaaaaccatcataattaaagtaaaaactttaattatgatggtttttttgatgggcatattaactgatattcgttaattagatgacaataatgggagggagaaatagaatgataacatcgttactttagttttatgagaatattctaaagatatttaaaaatttatttatatccaaaaatagttaatataatgcgaatctatagtgaatttcaattaatattaacattgttttccgtggctatggatggcattgttgtgttaagcactgaatgggcaactttttaccaaacacttacgcaaacaccgattacgattattgctaatgcggttgaactacctaagcaatacaaataccatagtcagtctaaacaaattatcacactggggcgcttaggcgaacgtaagggcacctacgatattctaaaattagcaggggtgattcaatcccgttttccggatattcaatttacgttgtatggtgatggtgaacaggggaaggtccagcaagaaatagaccgcctaaagttaaccaatgtgcgccttggtggctggttagctttggcggatcgcaataccgttattcaagaaagcctgttacacctattgcccacatatcaagaaggcttaccaatggcaattttagaaacgatggcttatggaattcccaatttagctacgaatgtcggggacattccacaagtaattgagaatcatgtgaacggggatttggtgacaccaggagatgacgctggcttagttcaacaactcagtgattttctaggtagtcagatgcgacgtgaaacatattcacgaaatgcccggcaaacgattaacgactgtttctcattgcaacagtattttagccggtggcaccagttttatcaaaggattatgaatgaaacggaggaggaatgatgaattctatagcgcaatcgactgataaattagagttgattaatttctatcatgagatggctcaaatttcagcaaacattagtcaaattttaaatgaagacggagttaccatcgaacaaattcgtattttacaaacattaaaacgctataaaggtattaataatagtaagattgcacaagtattaaaaacatctaccgcagcatcttcaaataaattacgtaaattagaggatcaggggtatatcagcaaacaatatggcaaacaggatgatcgtcgaattgttgatatagcagtttctcccgctggagaatcaatttatcgtcgatttgagcaggcgtgtggaacttacattaaaagtattactgaatcagataagaaaattagcatgccagaattaatgcagctgtttgaaatgacaaatagacttgctagaagtattcggacaactgaaattgaatagacaaaaaaagtgcccacaaacggttaaatttgtaggcactttttttgatttatttttgttcagcatgttttgctgcaattaatgaacgatagttgaatagtaagtttaagatgacagcgctgagactgccgactactaagccgttgcctagaattgtgcgaacactcgttggtagtgattggagcaaggttggatgaattgctacccctaagcctaagccgattgaaacggcagcgactagtaagttgcggttatcatcaagatcgactttgtgtaacatcttaatgccttgaatcccaacagtgccgaacataacgaccatcgcgccccctaaaacagcgcttggaataatggttgcaacggccccaatcttaggtaataatcctaagatgattaagaagaatgctgagtagtaaactggttttttcgttttgataccggataattgaacaatcccaacattttgtgagaacgttgagtaagggaaggtgttgaacaatccccctaagatagcggcaatcccttcagcgcggaagccccgcttaagatcattgctagtaatgtcgcgcccaacgatttcaccaagggcgaagaagacaccgattgattcaatcatggtcgttaacgcagccaatgacattgaaacaattgatgaccattcaaaacgaggtgttccgaagtagaataattcaggtaatttgaaccaacttgcttgacctactggatctaaggacacaatcccaatcgcagctgcgattaaggtcccagcaataatcccaattaaaatggcgatttgttggatgaagccacgcccccagatactaaaaatcaggattagggcaatcgttgaaaaaccggtaattaagtttggtgtactcccaaacgacttagcagcaacatcgccaccgcctaagttttggaaagcaacgggaatcaatgtgaatccgattaatgtaatgagagaccctgtgacaactggtgggaagagccaacgcaaacgtgcaaacaagccagaaactaacaagatgaaaattccggcgccaataatactaccgtacataacgtcaattccgagttggctgttagtgccgatggcggctaacgggccaacgtactcaacagcacaacctaggacaaccggtaatgcaatcccggtcagtggggttcgttttaattgtaatagggtcgcaaccccgcacatgaaaatatcgactgaaacgaggtaagtcatttgagcggcattaaaatgtaatgcagccccgacaagtaatggaattaaaacatcgccagaatacattgctagaagatgttgtaagccgagaatcgctgctttaatgtggggaagcttttcatttggattaattggctgtgctgaattcgagtgtatatctgccacgagtgtccctccaagataattgttaaaatttagttaacatttagtttagcacacgccaatagtgacttcaattagaaattaagtaaaaaacgaatataacattcttaaataatcgcgatagttcgcctttgtgatgatgcacaccaactgttcgatgacaaaagtgctttcttactgaatgattcgcttgaaaaaggcgataattgttcttaaattaccgattattatgtttcacatgaaacgataatctgaaaactgggaagaatcttgtttttttagggtaagtacgttaaactaaaaggtatatgtgaaacaataatgttccacaaattaaacgcctactttaaagcatagttaaggagaaataatgacaccagcgggttttgcagcaacgttaaaaacatacaatattcaagtttcacaagcacaaatggatcagtttgaattgtatttcaaacggcttgtacaagtgaaccaacaagttaatttgacagccattacagaacaagaagcagtttatctcaagcacttcttcgattctgtcacaccaactttgtatcttgaaaaactacgcactgaaccccttacgatctgcgatattggtgcgggcgcgggttttccatcgttaccaatcaaaattttattcccgcaattgaagattacgattgttgattcattaaacaagcggattcacttcttagaagaattggtccgtgaattaggcttgtctgatgtgacgttggtccatgatcgagcagaactgttcagcaacccgaagagtccatatcgtgaacagtttgatattgtgactgcccgggccgttgcttcattaaatgtactggtagaattctgtttaccaactgttaaagttggtgggcagtttatcgcattaaaagcgagtcaaggtgaaacggaattggcagaagccaactatgcaatcgaaacacttggtggccaatttgcacaagacattgctttgacgctaccagaaacagatgatcaacgacatctaatcgtaattgataaggttgtaccgacacctgccaagtatccacggcgggctggtgtgccagttaaaaaaccgttaatggctaaggaggaaaaataatggcactctcattttttaataagaaaaaagacgataaaagtattaatcaagtgatcaaagtgccggtttcagcaattgtgcctaaccggttccaaccacgaaaagtatttaatgcggacaatatcgccgaattagcaagcacaatcgaacaacacggcttattgcaaccgattatcttacgtgaatatgaagatcaaaaatatgaaattattgcgggtgaacgccgttttagagcgattcaaaccctcaaatgggctgaattaccagcgattgttcaaactatggatgatcacgaaacagcttcaatggccttgattgaaaacttacaacgcgaagaattaaccgccgttgaagaagcacaagcttataaggacttaatgaagctgaacgacttcacacaagccagcttggcagaaaagatgggtaagagccaatcttttgttgctaataagttgcggctattgaaactctcacaacccgttcaagaagccatcatgaatcatgaaatttctgaacgacacggtcggagccttttacggttggatgaattcaagcaacaaatgattttacaccaaatcttggctgaacaattaacggttaaggatacggaagcgctggttaacaagacgttgaatcctgaaccagaatcaactgaagagacagttgatgcaaccgatgacagtttaaaagaagctaccacgaaggctaaaaaagcgaacgataaagcaaaaaaagcaattgcccatgatacacgcattgccgtcaacaccatcaaaaagtcggttcaaatggttgaacaaagcgggattgccgtcaaagccaccgaagaagaacaagatgatgtttatcggattacgatcgaaattccaaagcaataagggaggctcattatggcacacgttatttcaattgcaaatcaaaaaggtggcgttggtaaaacaacgaccacgattaatctaggcgcttgtttggcggatgctggcaatcacgtgttaatcattgattcagatgcacaagggaatgcgacaagcgggattggggttcaaaaatcccaagtcgaaaaagatatctatgatgtgttggtcgatgaattcccactaaaagaaacaattattaaaacatcacataagaacttagacattgttccagctacgattcaacttgcaggggcagagatcgagctaacatcacagatggcgcgtgaaatgcgcttgaagttagggttagaaccagtcttagccgattatgattacgttttgattgactgtccaccttcattagggcaactttcaatcaatgcctttacggcaagtaattcaatcatgattccagttcaaagtgaatattatgccttagaaggattgagccaattgttaaacaccgttcgtttggtgcaaaaacattttaacccaaacttagcgattgaaggcgtgttgttgacgatgtatgatgcgcggacgaatttaggggctcaagtgattgaagaagtgcgtaagtattttggtgatcgggtttacgacacgattgtgccacggaatacgcgcttagcagaagcacctagtcatggcgtatcaatcattgattatgatccaaaatcacggggcgctgaagtttaccaaaatttggcaaaggaagtgttagcagctcatggcaactagaaatggaaaaggattgggccgcggtttggatgctgtattttcagcgttcgaaggccctaataaaaaccgggcggatgaattagttgaagagattgcacttgatgatattcgtccaaatccctatcaaccgcggaagacatttgatgaagcggctttggctgaattagcagcgtcaattaagaagtcgggcgttttccaaccaatcattgttcgcaaaagtattaatggttacgaattaattgcgggtgaacgccgattccgtgcgtctaagttagctggtaaaacagcgataccagccatcacgcggcagtttgatgaatccgcaatgatggaaattgcggtcttggaaaacctgcaacgtgaagatttaacgccgttagaagaagcccaagcttacgatacactcttgaaaaagttaaacctgactcaagctgaagtatcagaacggttgggcaagagccgcccatacattgccaattacttgcgcttattgggtttacccaatgacgtgaagacgttattacaaaatggtgacctttcaatgggacaggcgcggacgttattatcattgaagaaaaaaagtcagattagtgcattagcgaaacgcacgattgatgaaggcttaacggtgcgacaactagagcagttaattaaccagatgaaccagattaaagctgcgaaagtgacgaagaccaagattaaatcaccctatattcaagcgagtgaaaatcaattggtcgataaatttgacaccaaggtcaatattgcgattaacagcaagggtcgcggaaagattgagattgattacagcacagtcgatgatttaaaccggattcttgcattgctagatgtgaatatcgattaaagtgaggagtcgagctagatgtatacattaggcgatcttgttcagatgaaaaaacaacatgcctgtggcaccaatcgctttgaagtggtgcgcttggggatggatattcgaattaagtgcatggggtgcggccacgccgtcttattaccgcgccgtgaattcgaaaaaaaacttaagaagaatttggtgcctgcagcacaagtcgttgttgcagatgaaccccactatcaagagatgcaacaaggtcccaaccaaactaatttttaaagtaaaggaaagtgtaaaaaactatgtcattaaccgcaggaattgtaggattacccaacgtcggaaaatcaacgttatttaacgccatcacgaaagcaggcgccgaaatggcgaactacccatttgccacaatcgaccctaacgtcggcatggttgaagtccctgacaagcgtttagaccggattcaagaaattatcccggctaaaaagatcgtgccaacgacttttgaatttacggatattgctgggatcgttaaaggggctagcaaaggtgaagggcttgggaacaagttcttggagaatattcgtcaagtcgatgcgattgtgcatgttgtgcgcgcctttgacgacgataatattacctctgttaccggaactgttgacccgttagacgacatcgatacaattaaccttgaattgagcttagctgatttagaaagtgttacgaagcgttatgcgcgtgttgaaaagattgcgcggacgaaagacaaagacgccttagccgaattcgaagtgcttaaaaagattaagcctgttcttgaagaaggcggctcagtacgttcaatcgaatttaatgaagatgaagcgaagttagttaaaggcttcttcttattaacatcaaaaccggttttatatgttgcaaatattgctgaagatgccatggctgatcctgatagtgtggattatgttaaacaaattcaagcgtccgcagctaaagaaggcgccgaagtaattgccatctcagcaagaactgaagaagaaatcgcctcattagatgatgccgataaggctgaatttttggaagccgaaggggtgactgaatcagggttggataaattgattcgtgcttcatatcatctactaggcttagcaacattctttaccgctggtggaaaagaaacccgggcatggactttccgtcaaggcatgaaggccccacaaaccgccggtgtcattcattccgactttgaacgcggatttatccgggcagaaacagtttcttttgctgatttagatcaatacggttcaatgcaagctgttaaagaagctggccgtttacgtttagaaggtaaagaatacatggtcgaagatggcgacatcatcgaatttagatttaacgtttaatgataattgaggaggaagacaattggctaagaacgaacaaccagcagtaaccccagaaccagttgatattgaagggttagaagcaaaactcagtaagaaaaatgcggactatttatttaagttcaaacgcgcattaaatgccgaacaagtgccagcagaacgccaaactgaaatcttggcagaaatgttaccagaaatggtagcagaacaacataagggcaagcctgcaacacaagtatatggtccagtgacaaccaagattgatcaattgttgcacgcgccaaaacgtcctaagcaaacatcacttcaactccaaatgcttgataacggcttaatctttttaattatgtacctagcctttaacggaattgcggcttatttctcaacgaaggggtcagcaaccagcattgggattacatcaattgtcattacggctgcgcttgcggggatcatcatgacttatccaatgcgctatacgcaaatgccaaaagaacaacggccaccattttggaagatggcattggttgtaatcggcttaacactagcctttgttgcggcatacggtgtgacaatcttgattccaagtttcttgaatccagtcttgccaccacttgttcaaatcgtaattgcagcactcttaatcggcgtgcggatttatatcaaacgccgttttaagattacaggttcattcttcggttaatattacccgggaaataaatggcaattgaggaggatttgagatgattagcactgaagaacggcaaattggggcagtcagtacgttgattgtggccccaagtggtcaagaaaaagcggtattaccaactgtctttgtatatcatggttggacgcaccgtaaagagtcagaattaatggtcgcccactttttagccaaggctggttttcgcgtggtcttaccagatgcgaagtatcatggtaaacgacatggtagtcagctcttttctgagttaatgtttgaattttgggacattgtgatgcagtcggtcacagagtttggtgaactggttgcaacactgagcgctgaaggcttagttgatcctgaacggattggtgttacagggacttcgatgggtggcattacaaccgatgcgattctcacccgatatccgaatgtcaaaattggcgttgataagattggcgcaccaatgcctgtcgcacttgctaaatggcaggttagtcaattaccaacggccttgcaaaccaagtatcaagatgcgattgaagataccctagcacggttagcggcgtatgacttatcaatgcacgttgatcacttggcaggacgtccattgcatttctatcatggaactgctgatacgatggtgccatatcaattcacggcagattttatgaccgaaattcaggcgcaaccaagttcagccactgcattagtgacattaacgacggaagaaaatgggcaacataaagtatcagacgatgcccaactcaaaaccgttgaactgatgcaacagtacctactttaaaaatgagaaaagccgccagaacgtaaattgttctggcggcttttttgatggggacacaaaaaaaccagccttggggagactggtttctagcagatccgaagatctaaaaaggagtagggggtacacgtattactttgggggaataatacgtgcgtggtagattgcgtctaccttaattttactttggaggagtaaaatgaaaaagttaagtagtatgaaatagaaaagattcgcttttctatactcaatactataatgggaatttgtgaagattttgtgaccagaggtttatagatttatgaaaaaagcaataaggaaagtttaagggtcaaagagtatgctaaaatgaaggtactttataagagatcgagagatgattgatatgacaaaggggaccgttttatttgatttggatggaacgatagccgattcgcaagaaggcatcgtgaacgccttggaatatatgattgaggagttatcattgccgacgcaaaccaaagctgaactggtcacattcattgggccacccctcaatgaaacaattatgcgtgagtttggtttaaatgcagctgctactcaagaagctattaaagtctttcaagcctattatgcgcctaaagggttgtatgaaaatcaactttatcctggcatgcgagaaaccctagcggcattgcaagcacaggatttacaactggcaattgcgacttcgaaaccagaaccattcgctaagaaggtcattgatcatttagagttaagtgattactttagcggtgtttttggagcaagtgttgatgagacaacgcgggtcaaaaaagcggatgtcattacttacgcattatcagaacttggtctatcaccacaaaccgcaccattactgatggtgggtgatcgccaaaatgatatcttgggcgctaagcaaaacgcgatgaatgcagttggtgttagttatgggtttggcacaatcgcggaactcaaaaaggcgggtgctgtccaaattgtccaacaacccaccgagttaatcacatcattaccggctaatcttaaattttaggcatgctgttgcgcgttagcgaccattaaggtataaatccgcgcgacatctttcgcattgccacggagctcataatcggcgataaacggtgcatcgaattgtaccgcataccgtttagcagttaagcaatattgttcgttgaagttgcggttcccgctaccgattactccataacaaaggcgtgcgttctgcgcataatcgatgtattcgcctaagctattggtcattaattctttaacgccattatcaatgccgttgccaccatctaagtaagttggaacgaacgcgtaaaacggttcggtctccgctttaaagggggtcgcatccgaaatttctgtgagggtaatggttggtaacgctgggttattagcatgttgttgcgccgcataatcctgtaaatccgttacaaatgaacgtgtattaccagcaattgaaatatagagaatcgttaaattttttaacattgaatggcctcctgtgactgataagttcactttagcatttaatgattaagaatcctagtcttgaagtttaatagggttcgtgaatagaaagggtgtttaatcaatggaaccaattagtcgtttgaatcaaaatcaaccaagcgtgcgaccacatcgaggtttaagtcgctttttgacgttcttaatctttctttgcgttttccttggcattagtggcatgattctcagccggacagttttgagagaatcatttacgcaagaacagctcagtgaaccgaagacgttagctgcgatgactgataaaattaacgttgttttattagatgcggcacaaaaaaatgggctaccaactgaagtacaagtcaaattactgacccaatctgatgtgcgggccgatttaaagaaaactgttcataatatttatataggacaagaaaagccgttacccacagcacaaatgatgggacaacttgcagcccatttagaagcagttgtgcctgaaaatgcgttgacggaatctttaattaaaacggcagtggttgcggttcaaccaccactacaagaatacctcacgaaccaaattgaagcaccttacttagcaccactagcgactaagatgttgtttgttagaaatgtgatcaatatcttaacctgggttgcaattattatgggaattgttcttgtactagttcaatggggactaagtggtcaattccggtatgtattagggagtgttggtgcaagttttgcttggagtggcttattcttggcactaggggcggctgcgtttaaatatagtggcattgttgaacaaattgctcaaaaagcgggcgattttaatcaaacaattaccgactatgggttggctgttctggattatggtttgaagacaagcactattgttttaattggcggggcgattgtctggttggttgcaacgcttctccaaagagtacgacattaaaaaagatgacctttgcgggtcatcttttttaatagggcgtaatcacgatttcatggttcaagtagttagccatgtagatttgttgaagactgtagccttgctgttgaatgtcggcgaggagccattcttcagtttgatcgattaattcaagtgcttctgaattaatctggccgtccataatcagcggatatttaatcgtggcgtcgcctttttgcgtaatggttaattgtccgttttgttccaagattgcgcgactgaccgtgcgaatatcgctaatcccggcaattcggagtttaaacgacagatcctgtgcggataaactattcttagaggccgtttgaatatcaatgtggccgttggtgataattgtttgtggattaccaattacccagcgtttaatccagcgattgtgagtggttagaaacttcattgtgaagacgattaaggtccagatgagtaaaacgagtaagaattgtaagagcgagatatcggcattataaatcataccgccaacaatccccccaagaacgtaattttggagttgatcaatcccactgctaggggctaaattccccttgccagagaggttgatttgtaacactaaacagaagaaaccgaaaattaatttaatggtaatatcgaaataagatggcatagtaaactccttaatcttgataggtgatgtcttggctaatcaactgagctttttggagttgataactagtaaaattgttatcaaatatgacttggtagttttgatgaccgacgcgcactaccatgttttgctgaagcgaagtcgtgttgactgcgacggttttaaggctagctttctgcgcagtcgccacacttctaatgaattgcgccatctgggcttgttgcgagtgggcggtgttaagctgttgaatccgtgtatattgaatgccggcgagtaaaatcccaactaagccgaagatgattagtaagtcacggtacttcgaatctgaacggtggcggagatattgaacgaagaagatgatgattaaactggcgatgatcactgacagacttagtttgagatagaattcgaaatcattctgattgctaaagtatgaataccgataaaaaagcataatgacctccttaaataaacggttaagcctattgtagcacaccggctgagcagatagattgtgtcaaatttaaaacggcggtagactgaaagcatgaaagggatgattgatatggcattaaaaataacacctgcagcagttgcgaaaatcaaggataagatgacaccgggtcaaaaaattttattggacttagatgacggtgttggtccattttcaaacgttggttattgctcgttggatacgaactttagattgctattagtaccagcggatgctgacattaaagattatccagatgaatttgaatcaaatctaggggctgtttactacaaagattatgcagctggctactttgatgaacatgaagtattagacgttaacgaaaagaatcaaatgttaaccttgagtaataacagtggcttaattgatgggcacatctccattgtcgtatttgagaatgaatcaatgactcattaataactgtggcgtcgggcagaaagtggtccggcgttttttgttgttcatttgtactttatccacattggtgggataatgacaaaaacagttttattgaggagcctgacatgaaaacagcaattgtgactgatagtgcggcgtatttagattcacaagttgccgccgaccataatattactgtggtcccaatcaccgttatttttggacaacaaacttatttggaaaatatcgatatcacgagtgaagcattttacgataaaatgcgcactactgaaaaattaccaacgacttcgcaaattacaatgggtcagatgcaacaggtttttgatcaattgataaaagcgggctacgatgaagtgatttgtatccatctttcaagtggtattacgagctttgtcaataacctaaccgcctacgcacagtcggttgaaggcatcgaagtgtatccttttgattccaagattacgagtgccggtgaagggttcttggccttggaagcggcgcggttagttgcccaaggtgaacatgccgcaactatcatgccgaaattggtagctttacgagcaacgatgggcgtttatttcgttgtggatgatttaagccacctcttgcgaacgggccggatttcgaatagtgcggcctttgtcgggaatcttttgcggattaaaccgattttaagttttaacgatgccggccaaattgttgccttaacgaaggaacggaccaagaaacgggcctttcaaaaagtattagcggatttcaaagcagcagtcgaatctgttgactatcccgtacgcgttagcgtgattgacggtaataatccagaagaaagtgtgcagtgggtcgcaacgttgacggaaacattcccagggatgccgattgaaacgagtcacattggtcctgtggtcggcgtgcacaccggcgaaaaagtaatggggctcatctggagtcgtgattatttagcataacgaaattaaaaaacagccttgcgcatttgcgcaaggctgtttttgtttaaatgtgtgctattagccatctccttgtggttaatcctcaggagatggctgatagcacactctttttttaattggtttcaataattgtattgttggctgtattattttgtggttcgctggagacttcaaaccagtcgatgtaaccgcgattgaattcgaccacttttaatgtgaattgattgatatgaatgaccgcactttgttgtaagtcggtgaagttttctaagacataaccggccagggtcacgctatctgaggcttcgaaggcatcaattttagtcttgaagaaacgttcgaaatcatagagcgtcgttttcccactaacacggtaacggttatcgtcttctttgatgatgtattcatctgaaacatcgtcaatttcgtccttgacggtcccgaatagttcttcatagatatctttatcagtgacaatcccactcgtcccaccgtactcgtcaacgacgaccacaattggggtttgcttattgatcatttggttcaacaaactgtgaataggggttgcttctggaacggagataatcgaacgcagtaacttgctgacgcggattgaatcgtcgacttgtgcctgacggactaaatcatatgcgtagacgtaaccaagaatcttgtctttatcattttcagcaaccactgggaagcggctaaagccttgttgtaagtagtcttttaagacgtctttaacggtatcggtgatatcgacgacgtagagacttgtgcgatcaaccatcacatctttggcaatccggtcattaaagtcaaaggcccgttgcatgtaaactaaatcgttgcgatctaattcaccaccagtgacggcatttttagagaggctaatgatttccgcttgggaaagcacatcactaccttcttcagcaggtgaaaagccgattaatttcacaacacccgttgcggaaatgttgagtaaccaaacaaatggatagaagataatatgacagtaatggaggggcttagcaacagccatcaacatctgcattggaatatcaatactaatattcttcggcacgatttccgtgaaaaccacttctaaataggttaagactaacacgccggcaactgcgccgatgatgtgtaagccaccatttgaaatcaggtgagtgagaccgagcagatcgactagaatggtttcgacggttgattcaccaatccaccctaaaataatcccggcaacactgacccccacttgggtggttgagagatattcgtttaagttttgcgtcattttaagcgcaagattcaattttttaggattaccatttcctgaatggatggcatcttctaaggcacttggccgtgtttggacgagcgcaaattcagcggccacgaagaaggcggctaaaaagaaggtgaccaacataacaaatagattagtgaataactcaccacttgacaaaataattccccatttcttaactaactagttctattttaccattctcaagcttaaaacggtaaataacgtcgggctttagtccgattttatcggattcaataataatgaaaataccataatttagggaagaggtaaactaaattgttaaatatctaaactaaaatacgctttgtcacattttgacgttgatctgtatcgaaaaaagccactgtgttagtggcttttaaacagttttagaatgttgcagtatcaggatcttgcgcgtgtccaacgacgccgtcaagtgcatcaattgcagccatgtcttcatcggctaattcgaagtcgaaaacttgggcattttgttggatgtattcagcatgcacagacttaggtaatggtaagaagccgtgttgtaatgaccaccgtagtgcaatttgtggaattgagcgttggtatttgtccgctaattcttgcatttctggcacactgaaaatcttcccagtcccaagtgggctataagcttctaataacatgccatgttcacgtgagtattgggcagtttcaggttctaattcgccaggggctaagaagagttggttgaccattggttgtaccgttgcagtctttttgagcgcttctaaatggcgaacacggaagttgctgaccccgatggcccggactttaccagctttgtagagcatctccattgcacgccatgtttcggcgttggctgtttcccaatcatcacggtaggcaattgggttgggccagtggattaagagcaaatcaacgtagtcggtttgtaatttcttgagtgattcttcaaaagagctgattgttaaatcataagtgtgattactattccagattttggtggttaggaataaatcggaacgatcaacgccactagcttggatggcctcaccaacactcccttcattaccgtaagcttgggcggtatcaatgtggcgataacctgccttgagcgcctcttcaacagcagctacggctgtttgaccgtctggtgtttgccaagtcccgaagccaattttaggaatttgcacgccgtttgtgagcgtgtatgaactcgttaagttagacatattaaaacactcctttatcagtttaaaatctctacttacagtttacttgttttcgatagagatagacagaaaaccgacttattccccgggaaataaaatcgatttgtcataagctgagcaatttggcctgaagtgcgggatcaacagcatagaggtaaaggccgtttctagcgcggctcattagaacgtagaggctattaagaataatttgctgtttcgcggcttcaggatcagccagctgtgctgcgccggcaaatgcggcttggtcctcgtaatattcaagatgaataactagccgctcactttgtggatcatacgtgacggatggcccgatgatgacgccggcatagttgagatcaaagccttgaatggtgtacacggatccgacttcatctatactatcttcacgttctgcccaataggttttagcggttggctgataccgatcccagcgtaatttgaatgtcgatgtctcaacgaagtgatcgtgaccatcattgagtgttgctggaaaatcgtaagtagctagcatgcgtgcaagcccactcgtttggtttttaaagcgaatcgtttgatagagctcattggcatcggtgaatattttgaattcaaagtgtggatcatgtggcagggcagcgacttgttgttgatgaaaggtttgcacccaattttcaacacttggatgggcttgcatccgaaattgatgggttagttgcgcggtctgatggggagcagcttcaattcgttggcggagttgttgctgttgccagaagctcttcactttaagcacttgctgttcatcaaaaatcagaatggagatccgactgtgtcggcgaatttcatcgagttgatttgtttgattgaagtggctataggggtcggatttggttaacagtaggtgtgcctcatcaacgaggacgatatcggcaagttggtggtttttagccgcttgattgatgaatgtcgttgggcgttgaaaatcttttttcaataaaacgggtgccgttgttgtgccacttttgtagagttttagcatttctggatgattgaccaatagaacgttttgactgccatagagtggcgaggtgggtgtttggcgcgcaagtgtctgcagtaccttgaagacactgctgagaatcacgctcttaccagtcccggccgcaccttgaatcaagaaggtggcgtgttcggcgtgcgcgtttgccaaacaaaattgaatgacttgttcttgtagtgcttgttgttccgttgttagttggttggcgggacgattgagtttataaagcgcgctattttgacgctgtgcatttggcaaagtgaggactcctgttcattcatttcaataaaaaaagccccagtagatgtagaaataacatcgcctggggcagtcgtgctaatcgacaaaaattagttggaattcatgttgcactaaatcgagattgacggagacgtggcggttgagatcggccacaattttacgcgctaatgttacccgttcttcgaagcttgtggcaagtgccgcgaattcagtttgtttaaagttgtagttttcagtgataaaaatcgcgtctgtgacatataacaggttattttcatcgtgacgagaaccgctctttaaaacggcatcgatataatggtaaagctgagtaggggcaaagttcaatggttggtctaaaacggttgtaatctgaaaatcaggtaaatcgtcaaccatttgtgtgtttagtgtgacttgggttaatgcttgatacagtttcatagtgacaccttcctaatgttgagatttaaggtcgtgcttgtggagcttctaagtggcgttgaataaagcctaacgtcacatcagcgataatggccatcagggcggttggcagggcaccagctaagattaaggcgccgccattagtggcgttggtcccgcgaataatgatgtcgcctaaaccgccggcaccaacaaacgcgccaatcgctgtaatcccgatggcgaccactaaggcattgcgaatccccgccataatgacggccaatgataagggaagttcaaccatccgtaacagttgccaatttgtcatgcccatcccgattccggaatcgataatattatcggaaacattctccataccggtgtaagtatttttgataatcgggagcaaggagtataaaaagacagtcgcaatgacggttcgtgtgccaagccccaagccaagcataatgattgagagcattgcgagtgaaggcactgtttggatgacattcgctaccccaattataacattactgagctttttccggtgcgcaataaaaatccccaagggaatgccaatcaacgcggcaagtaaaacgccataaatcgaaatcaaaaaatgatgactaaactgccgtaaaacataactgccattatgctggaaataatagacaagttgttgccaagtatttaaattagtcatttagcggctcctttccggaaataattatgttcctgaagaaattgttttgcgactactgcgggttctagtagatcattatcaactttaaagttgagggtttgcatggtgtcgaggtcgattttgccatctagacggtgtaaaaggggcgctagtgctggctgttctttgagaatctgatcagtggcgaccacgctcgcatcgtatggtgggaagaagcggcgatcgtcttttaagacttttaagtcataacttttaatccgtccatcggttgagtaacctaaaacgacgtccattttaccagccgccagtgcgctgtaaaccagtccgatttgcatgggcgcaactttcttgaaatcatagccatacgtttctttaaatgcgggatagccatcgccttcgtgatttacccagacggaatcgacaccagctgttagttgatccgccacttttccgagatcactgacggtttctaaatgatatttcttggcggtttcctgggtgaccataaaggcataggtgtccgcaaacccgtaggaagggaaccatgtttggttgtaacgatctttgaaagcttttttaacgattttttgggctttttcaggatctttagtaggtttcatttttaaagtaccagtaagttcagttccagcgtagcgactagcagctatgtcggcgtcaccacgaattagtgattcatgcgttaccgttgaagaacccagattattaattaaagtgaccttattttgtgtttcgtgggtaatcaactcgctcagaatattggcgagaatttgtgactcagtggtgcttgaagagctaatgcgaattgtttgtgattgacggtttccgatgccaagtgactgacagccacttaacaggaggagactgccaactaataatccgcaactcgtaatgaatcggcgtattttatgcataggagcctccttatctgattgcagcgggggtcagttgtttttccaaccggcccaagccaaaatcgactagcaatgctaacaatgtgacgggaattgtcccgccgatgattaaatccggtttgaaaagattcaacccgttgaaaatcaagtcgccaagaccaccagcgccaatatatgaagcaagggttgcccaagcaatcacgtaaaccgcagataggcgaattcctgccataatcacgggggtcgccattgggatttccacttgcataattgattgtaccggcgtcatgcccattcctttagcactatcttttagaatcggatcgacatcgttcatgccgatgtaggtgttccgcaaaatagggagtagtgagtagataaataaggcgatgattgctggtactttgccaatcccaaagagcggaatcattaaagccaatagtgccaatgaggggacggtctggagcatgctggcaatggcaatcactactttggcagttttaggaaatcgggtgagggcaattccaaggggcaccgcaactattatgcccagaactaaggcgattgcggaaatgtagagttgttcccaagttttaatcagtaaatcagagccatgttctgttaaaaaagtgagcatcatcgattcctccctttctattgttggtcggattctgcttcagattcgtcagtatcaccccagacagcatcataaacgacatcgactagggctgtccgggtgacaatcccaacaagttgatgatcatcgttgataacgggaacgtatttccagccccgtttaagaatccgttcaatggtatcccggaccaaatcattttcgttcacgtaactaatcttggtagacataatgtcaccaacactagttgcgtctttgtaatgatggtcgatattttcaatatcgacgagtccctttaaatgttggttttcgtcgacaaccagtaaggtatcaacgcggcgttggcgcattaagcgaatcgcatcaactaatgatttacctggtgtgatagcgactggacttttaagcatgatttggccaacagtttcgacatttggtttggcttcgatcaaacgatcgtgaccgattaagtcttcgacgaattggttggcaggatttcgcaagatttcattgggcgttcccatttggatgatttggccgttatccatgatggcaatgcgtgacgctaatttgagtgcttcatccatgtcatgggtgacaaagacgattgttttaccgagttctgattgaagttgttttactaagtcttgaagtgcctcacgcgtaattggatcgagagcaccaaatggttcgtccatcaaaataatatcttgtccagctgcaagtgcgcgaatcaccccaattcgctgttgttgtccacctgataattggcttgggtaacggtctaaaaagtccgcaggcatttccactaattttagtaattcgagcgcctttgcatggcgtttttctggggaccattttaagagtttagggacaattgtgatgttatcttgaatagtcatgtgtggcattaagccaatattttgaatgacgtaaccaatttttcgccgcaatttaacggggtctacattagcgagattttcaccatctaaggtaatcgttcctttggttgggttaatcatgcgattaatcatccgcatggttgttgttttcccagaaccagacgtcccaatcaaacaaatgaattcgcctttgtcgacagtaaaactgatgtcatcaacggctttgttaccaccgcgatagagctttgaaacgtgatcaaacgttagataatgtgtcataaggaacctcctattgtgatgattggaaatttattgctatataataactatgttagatacgtaacatgcaactgtcaatgaatacgctttactgataggtatcaaaaagccggtgtaacggaattgagaacgttacaccggccattaattaacctgttgatttaggacgataaagaataaagtgggcgattaaagcgagacattgataagctagcgctaagagacaaacggcgacccagccaccgaagctccaagcgagggcgccaaagaatgaaccggaagcaccacccatgaaataggcaaacatgaagacggtattgttgcgactactagtggcttcaccaagcatttggacccgggtttgattggcaacctgaccgcactggtttccgacatctaataaaacaatcccgagcattagaatcggcatgaaatgcccccagaataagaataaaagataactgatggtcatcatgaataagccagtggcgataataaagcgaggtgatttagcatcggctaagcgaccgataattggtgcagctaaagcaccagccgcaccaaggattgctaatagaccaacggtaccactaccgagacgataggcgggactggccatatagaaaatgagtgtcgaccagaaaatactaagtgtcccaaacatgaaaaaaccgttgatggcggcttcccgtaacagccgctggtgcgcgataagccctggaattgaactgattgtctgccagtagcttggcccgttttttggacgggaatccttaggtaatttgagggctgccagaaggattaaaagcgcaatcgcaattgtagcgatgagatacacccaacgccaatgaatgtaactactaataatgccgctaaagcttcgggataggagcacacccattagaagaccactgagaatggtgccgagcactgcgccccgtttttgtggttgagcgaggacggctgcatatggaatgatgatttgaggaaccactgaggtgaggccaatcatcaaaccagtcaaggcaaagaaaatgaaattgggtgctaggtaagcggctaataaggatagtaaggataagccaagcatccgtaatatgagctggtaacggctcatcacatcaccaaacgggacaatcagcaacaagccaagtgcataaccgacctgtgtcaacattgcaacagtcccgaccgcaccacttgtaacgtggaaagtggtcgctacgagtgcttgaatcggttggatgtaatatagattggagacggcaacgccggtaataaaagccatcaaaaggattaatggctgcgtaaggactgttttttgcggagcactttctgacatactagggtggacctacctctctgaataacgttcttttagaatttgaagtgcattgtcgaattcaacttgggcttccggttcttcttcacgctttgcggctgtttctagaaagtctaaaatttcaggcgtgacatcgcgcactaattgactgagcgcccaagcagcagtgccgcgaatgacagggcgcggatcagtatcgatgagttcgagtaacttcggaatcgcggtgcggtctttcacgttggcgagtgcgataatcgcattgcgttgaagtggctttttgccacgccacgaaccagcaaggtgtccaaattgaagtttgaactgcttgttactgatggttagcacgggctgtaattcgggcatcacagattctggatctggctccatatcaggatggaagtggaagtcttttcctttattaaacggacatacttgttggcaaatatcacagccgtaaatgacactgcgaatttttggtctgaattcttcgggcatgaaccctttggtttgtgtttgataggataagcaacgcttggcattgaggcggccatcgcccattaatgcctgtggtggacagtaatcgatgcagcgcgtacagctgccgcattgattggccatcggtgtgtctggttcaaatgggatgttggtaatgatttcaccaagatagacataagaaccgaattcgggtgtaattaataaaccattcaaaccgatgaagcccaacccagcacgttgcgcaacagccacatcgctcagttcgcctgtatcaaccattggcttaaaagtaatttcagtatctgaatcagcaagtgtttcgatagcgctgatcagctggtccatcttatcgcgcagaatatcgtggtagtcaatcccccacgaagcgcgggcaaaactaccgcgtttagcaccagttcgcgctggcttattgatgatttttgttggataggcaagagcaatcgcgataatcgatttaggttggtcgaaaattaaatctggataaaggcgttcttcaagcactttatgttcgaatccagtcgaatgaccatttgctttttgttccttaagacttgcttctaaataatcaaaaggcgctgccgatgtgaaaccaatcttatcgatgccgatggttttgctcgcctcaatcacttgttcttttaaagtgggcattcaaagccacgctccttttttaagtttcatgtgaaacaaatgggttatgctaaataaattttgcgcaggtcagctaagtcgtgttggcttaactggagatcgtgtgataaatagtcttgcaacgaaccattttcggattcaatcgcttgtttggcggtatcgaggtaatcttgatgaaccgttagtaatgactgataactttggaacacagactggttctgtgttttttgttgtagttttgcaagcgattgggtcacgaaagcggcagaagcttgattcgttaataagtaatctgtgcgaatcgtttcttctggaacactgagtgcactcaacaagaaaacagcgcccatcccagtacgatctttaccagccgtgcagtgaaacagtaaggattggtcctccttatcgtttgctagcaacaagtcgaaaaattgccggtaagcttgcttggagtgatcttggttaattaagtcgacatagacttgaatcatatgttcatgaccactttttggatcagcactgaacgttttaaaaagatcagcttctgatgccgtactagccgtttcatcaattttgaaaacgggtaaggattcatagattgcattggcagggaccttgtctggtgacttggcagtttcttcaggtgagcgaaaatcaacatcatagcgcacgccataatcagttaaataagctaaatcatgtggtgttaggtgggctagactagcggaacgtaagactttatgccatttaagggtccggccgtcttttgtttgatagccgcccaattctctaaagttatggcctttttcaagtggcaaaatgcggtgtgtcatatgcgtcaactccttatccaatgataccaatattgtagcatatttaatgggcaatcaacttaacttgtcagtatgtggggagaaacagtatgataggggtattaagagtggagtgagcagatgattacgtattttgaaatgacacctgagggccagttggttgaaggaacctctgaaaaaagtgccgactggattcattttgaagcaccaactaaacatgagatgcaccatttcgctaaaaaataccacttaccagcggtgttatttgaggtggcccaagatatcaatgaagtcgcacggtatgaaacatttacaacggacaccggtgaagtattgacccatatttgtttactggtaccagttaaaacccatgattcagaagatcatgcggaatatattacgcggcctttttcgttaatcattagtggccagacgttattaactgtggggcatcaacagtccgagctcatcgatgaaatactcacgttagaaggcctggatggtcaaattgaaacggttgctctaaagagtgtttcggccatctatcaacgttatttagcggctttagcggtcgttgcgcaacagattgaacaattggaagaaaatgtacatgtttcgacacgcaatcggttgttgtatgcactcaagtctcttaaaaagagtgttgtctatttggatttagggcttaagagtaaccagcaaattattccgcaaattaaggcaactccattatttgagcgcgtgtcaggacatacagacttactgtatcggattgacttgcagtttgccaagtccgataaggcgattacaacgtatcgtgagttattggcacagttaagtgatttgctttcagatattatttcaaaccgattgaataatattatgaagacactaacatcactctcaattattctaacggttccgacaacgttaggtggtttctgggggatgaacgtaccggtcccgctagccgagagtaagttagggtttctcgtgctattaggattgtcattagccattagcctttgtgtcggttggtggttaaaaaagaaagactacttctaattaaatgttcgcggaagcgcttcgcttttttgcttgaattgtttttccaagcggtatattcttaaagtgtaacaggtgcatatagagaaagtgagatgaacaacatggttcaagaatataaaagaatactcgtcccagttgacggctctgaagaagctgaattagcactaaataaagcagtgtgggttgctaagatgaatcaggcgcgcttggatattttgaacgttttggataccaagcaatttgcagggagttatagtggcatgctttcaggagacgctattttccaaatctctgaagatgcacagaattatctcaacagtttaaaatatgatatccaaaccaatgacggtttgaaagatgtcgagattcatgtgcggtttggtaatcctaagaatgttatcgcacgcgacttcccgacagaatatcaaaccgatttaatcatgatgggctctactggcttgaatgcagttgaacggatgttgatgggttctgtgacagaatatgttaaccgcacagctatctgtgacgtgttaatcgtcaagactgatgttgaaaatcgcccttatcaaaaagcaagtaagaaaaaataaataacaatcccaaaggctaaaaaggatgaattctttttagcctttttgcgtagttcaatttaggaggtggtaataatgacaaaagctgattggatgtatgattcacctgagttattggcgtattaccaaacagagtggggaaaaccggaacatgatgaccaacgcttatttgaactattatgtatggagttgtatcaggctggcttgagttggcggactgtattaaataagcgtgctgcctttcggacagcatttaaagactatgaaattgccaaagtagcgcagatgacaccaaccgaaattgagcagttactgaccaatccggcaattatccgcaatcgtgctaagttgaatgcaacggtcaataatgcacaagccgtccttgcgttacaaaagagtgcaggaagctttgatcagtatctatggggctttgttgatggacagccaattgtaaatcggccccgaacttgggcggatgtccccgcaaaatcagagctatcgatccaaatcagcaaggatttaaaacggcggggctttcaatttgtcggaccagtcgtcatctattcattcttacaaggagctggcgtaattgatgatcatctgatgtcacagtaactttttggtgcagtcagtcgcgctaatattgcggatggtgtattatggagggatagaattcatttagattaattaaaggagtcccacatatgacacaggataatgttcgccaattagcagattggttagaagaaaacatggcagcaattgccgatcgcaaagtgcaattaaatccagaaacaatttttgctgttttggatgattttggcgttttaaataacccggtcgttaagtattttgatattacagaagaaacatattatcaatcagagtcagatcataaattaacgttatcagatgaccacaaattattaatcgatgtgaccgatcggattatggtgacccacgtggatggtgttttagctgaaaacaaagtcaactttgaatacagccacgaagctgtttatgaagatcaatatctcgttaaacgcgatttagaagtgttgacatatggtttggctgtcattggtgcagtggctgcaaccgttaaacataacttaatccaagctgatttgtctaaagatgctgtgttgagtttagctttggctgcgcaaaacatcgctaattggcaagcaaaataatccagtaaaggttggcaagttaaatgggagcagtgctagaattgcgtgatttttcgcaaaaatatcagcggcgacaactttttaaacgtctcaatttacggattgatcggcaagcttgtatcgcgattactgggcaaaacggcgcggggaaaaccacgttgcttaacgtactagcaggattgacgaatattgaacgcgggacactggagattgcaccgaagatgcggattggctatatggctgaacaactcgcaccaaatggactgacacctaagacttatttgcggatgctaggagaattagatcagtttagcaatcgaaatttagaaggtcagattaatgaattagcctatgaatttgggttagcggcggcacttaatacaccgttaaatcaattgtcacgcggtagtctgcaaaaagtgaactttgtgcaggcgattttgcggaccccagatattttattgctagatgaaccgttggctggtcaagatggaacgacccagatgcggatgattcattggttgaaagactaccgccaaaaagggggcgccatcattgtcggcactaacaacgcttttttaatcgaacagttggctactgaaatttatgaactagatgcgatgcggctattgccgattgaagaattaccgcagccggaagaaaaggtgatgcggttagaatttgcaactacaccgcgatcactcgcacttcccgctactttacaacagttagctttaaaaattgttgatggtacgcggtacgtcgtcttgtatgcaaatatcaaaaatagtgatgaattaattcaagcaatgttaaaaagtggctttagcctaagggggttacgttatgaagtcctttagtgcacagttacgtttgcatcagaaaatggtttttgataatgggaatttgtgggggcctttgctattttggatagtggccttattagtcaattatgcggtgcaaccacaagatttcgtcggcagcctcgctacattattaatgacactgtttatcttattgacgtggttgacctacagttacatcaatcaatttccccttcaaatggaaaaacttttaattttaaaattaaagaagcaacgccgtttttatctcagtttaattagctatctcatcttgttgggattattctttgtcctaattgggatgggaagcttggcaattacttacgtgctcaatgggcaccacgcttttggtcgaggacttagctggtgggattggctaggcgggaccttaatgttgacgagtattttacctgtttcagtaatgaccggtttgttctggcaacggcgaattttagtgaatcgccggatggccggtacgttgaccatcttgatggtggttctcggcagtttaggtgaagcgattgtcaattactggcatccctacctctatattctggggattttgccacccgtttcgaccatggcgcaactcttcaacacgttgggacacatttcgctagttgatattttattatcatgggcaatgagtcttggttatagcttggtcttattattgattgatcaattaattttaagaaggcgtaaattcctattttaagaagctgacaggctgctataagcggtttgacagcttctttttaagttgaattaagcggttacgggtgaaaaaatcttaaaaatgtggcatgattaaaaagaattcaaatcataaaaggagcttttataatctatgacaaaaattgcaatcgctggctcaggcgcaatgggcagtcgttttggttacatgttacaatcagctggaaatgatgttgtgttacttgataattgggcagaacacgttcaagcaatcaataccaatggcctgacggttgtagaagcggggcacgaacccgttcaggttcgaattccggctgctttgccaacggatattaaagaagttcaagacgtcattattttattcacaaaatcgatgcagctagtcgacatgttacaagccatcaaacccttaatcggtgctaagacaaaagtagtctgtttattgaacggtctcgggcatcccgaaacgattgaacaatacctgcccaaagaaaatatttttgtcggcattacactttggacggcggggttaacgggaccaggtgcgattacattaacaggctctgggaatgtcgaattacaaaatgttgatccagatggcaaagaatcggcacaagcattagttgccttgttgagtgcggctggcttaaatgcgcaatatagttcagatgtactcttttcaatctggcgtaaagcctgcgttaatgggacactgaacagcttgtgtgccttgttagactgtaatattgcacaattgggccaaaccccacaagcgcaacaactcttgcgttcaattgtggcggaattctcagcggttgctgcaacagaagccgttgaattagacattcccacgacgattgcccacatcagcaagatgtttgcaccagaacaagcaggtggtcattatccttcaatgcaccaggatttagtgcaacatcaccgcttaaccgaagtggattacttaaatggttacgtggcacgcaaaggcgccgaaaagcacattgcgaccccagtcaaccaattaatcacggaattaattcatgccaaagaagcattattgattaaataaacgaggagtcttaactaatgacagaaaaacgccaattaaatatcgaagttgaatcaatgcactatcaaaaattattaattgctatcgatgatgatgacacaacctcatccaaacgggcctttaactatgcttgtacgcttgctaaggcctatcaaattccattagggattgtcagcattttggaaaccggcgatttgaacatttatcaatcactctcaccaaacgtggttgaagggcgccgagaagaaatcgcagccgatctagatgtttatgttcaaaaagcgaaagaattcggggttgaagatgtgacgccgattttaaatgaaggtaatccaggacacgtgattgttgaagaagtgattcctagtttccaaccagacttggtcatctgtggttcaaagacgaaaccatctaaacatttaatcgggacacatgcgagctatttagcgaaatacgcgccatgttcagtcacagttgtacggtaaattaagtatttggagatcagacgaatgatagaatgtacacaatgccatattaaatatgggcgtaaattgcaccaatgtcccaattgcggtctagtgcaccaatcaacgcaaacaaaacagcaaacatcgctcctgcaacaatactatcaatttttagcgcggagtttaaaacaaccgctaaaggtgcaatggcagtgggccaacctgtggtttggcttagtcacgtttggtctggttatattaatgaatactgcaacggcaagtttgctcattgccagttggtcagaacaaattggtgcggttgctggggtgatggcgtcacaaattgtcttgcgccaacggctaaacttattaccgcttgatatgaaggcactcggtggacaactatttattctggtggttgttttgggaatcggatttttactcaagcgttacttattgaagaagacgacaaccaccttgcgcgcgtatctaacggagattagtgcgtacagtgggataaccgttattttagcattagctgcgctgttggctgctctatgtttcgggatgaccgccatctggttcgtcttaatcatggttgcagtgatgtacgtcagtttgaacattgcggttgggattagtttatttcaaactcgatgggcagcttttgatcgcgtctatgctattttattatttgaaatcttaacccatgttgtcttggcaattggcattagccaaatcgtgattttaaacctactaacaggactctaaaaaataaaagtgcgtattttggtacactttttcaaaagaggtttatcattagagttgtaaaaaagaaatgggaggtttttaatatggcagcagctgttgaaaaaacattggttttagatatgaagatgtcagaagcatttgattggagtgacgataacacaatcgtccgtgatgctttgtgggatcactatatggaagccaacggccggaacacggataaaaccgttgaggcaatgaaaccctatcttaagatgagcgacgcggaagttagagaaaaggcagaagcgcttttaaaataaggcaataaaaaaagacccgctaatcattgttgattagcgggtcttttttgggtaatcctcaaagccaacccgtttgagtcagcacgctaacgaaaacgggtttcatctgccatatctttcccgcagaatcaggtactttgatttgaaacgtgcttcctcgagctgccttttccggttaacctaaaaacgggcattatggctgaaaaatcaccataatacccgttttttgttaatcctcaaagccaacccgttcgactcagcactctaaacgtgcttcctgtcgcagtaatttccgcttaatctaaaaataacataaatcctaaaacctggatttatgttatttttgaattaatgctcaatgactaagcgcgacagtcagcactctaatcatacatatattctcttgtcattgggaggtctcttgcgctggggccttttgatacgaggtattgaatgacatcaatgttcccagattcaaacgatgaggcacatgcttggagatagagatcccacatgcggacgaattctggacctgcttttggtaaaatgacgtctttttgggcgttaaaattagcagtccagatttccagcgttttttgataatggcgccggaggggttccatgtcggcaatttgtagtccggcattgataatgtgttgtgtattttcaactaaaccgggtacatagccacctgggaaaatatacttattaatccaggcattgcgcgcaccgccttgttgacgggtaatcccatgaaggagggcaaccccatcatcagtgaggtagtcagcgatatcttggaagtaggcaccaagattttcttcaccaacgtgttcaaacatcccaacactggtaatgtaatcgaatggggcgtgtttgagttcgcgatagtcaacaagttggacgctagcaacatcgctaaggccctcgtcattaatccgttgttgaacgaaatcatattgttcctgactcaaggtaatcccgaccactttgagatgatattctttagcggcggttaacatgagggtgccccaaccacagccgatgtcgagcaatgttcggttaggttgtggattgagcttgcgtaaaatatggtgcactttattaatttgtgctgtctctaaatcatcagttggtttttcaaaataagcacatgagtaagtcattgttttatccaaccaaagttggtagaagtcattccctaaatcgtaatgactttggatatcttttttacttgccttttctgaatgcgattgttttggaatcagatgaatgtagcgactattacgcatgaaactgtctgcgctagtgtaagccgccgttaatagtttttgaagtggggtatctgttgtattacttgtcacttcaaggtcgccagccatgtacgcttcgccgagggctaatgatgcgttgctggacaattgtttgatgggaatcgcttttttaaaagtaatcgctacttcaggctctccagaaccataggtttcggagctgccgtcccaatagttgacagtaacagggaaatcaaaagagtgttgtagtagtttcttataaaaagttttttctaacataccgaaaatcctttctaggtgtaaatttgaagtaccagagtagtatacgactatttttaaaaagatgtaagtcgcaactatcggaattccagaatatccaattagttcgaagtgttgtaaaataatgatatagaattgccataggaggaaagttgcgtgagtttatatcaaaaatttgtgacgaatcagcagttaagacgagttgtagtgctcttaacgttgattggggtcatctatgtgtcacgctcgatgatgaatatcattttgctgacgttcatctttacttttttagtgactcaattagtacgaaaggtccaacagtattcaaaaattccgcccgcagctgtggttgtgccgctttatatgttggtgatttttttagtgtatctagcagtaacgatttatgtgccacagattgctaaacagtcaattaaattaggcgagagtgtctataatttctaccaaagtccatcatttgatgcgaatcaatttatgcgaaccattggggattacatgaaacagttcaacttgacggatcagttgaaacacggtgtatcaacaatcgttaattacatcaccggaatcggaacaatgggcgtcacaattgtcttatcgtttattttgagtttcttttacacaattgagctagaccgattaccgcagtttggaaaactctttttgaagagtacttacggctggttcttccaagatatcatgtattttgctaaaaaattcgtgaatacctttggcgtggtaattgaagcccaaatcttcattgcaattgtgaatacagtgttaacaacgattacgttaacggtaatgaaaatgcctaatattccgagtttagccatcatgattttcctattgtcgatggtaccggtcgcaggagtcatcgtttcatgtatcccattgtgcattatcgccttttcagtcggcggaattcagtatgtggtttatatattggtgatgattttagtcattcatgccctagaagcatatgttttgaatccgcgatttatgtcgagtaaaacacagctgccaattttctttacatttgttgttttatttgtagcagaacgtttcttaggaacttgggggttaattgttggattaccaatctttacgttctttttagatgtactaggtgtgaagaccattcaaaaatcgggaaaaaaacaaaaaaaagcggctaattgacgcggttagaatccgcaacaagggtggccaattggttaaggtcgatttgcaattcgacagcaacaataaataatgcttttagtgatggggcagcgcctttttcccaccggaagatcattgagctactaatcttggtattatattttgcgctgagtagatcggcgagctgttgcattgttagattcttagcagttcgcttatcgtgtaataattgtccgaacatttagcaccgtcctttatcacgcgtttgacttataagtttaattatatgacaaatgacgtcaataagtgaacacttgggactaaagtttttaattgacagagttcttacattatcgtaatattcctaatgtggaacgggattgataacgtttcttgggggtgctgaatgtggcagaaaaattatttgttctatcaggttatttaaagggtcatgatttgaaacagcaagttgttgctgatgtattgggcaaaacattaacgacggctaatcgtaagattagagggaagattccatttaccgtcaaagaaattcaattactacatgaccgcttgggaattccaatcgacgtgtttttttaagaatagttcctaatcaggaactaagtaatcagttttaaatgaaccaaataaaaataaccctgtcgactgaaaatcgtcgacagggttatttttattggctattttgctttaaggagttctaatttaccttgaacaatcatttcgcaaagatcaggataactgataccaagcacttctgcttcttgtggaattaatgaaagtggcgtcatcccaggtaatgtatttccttcgatcacgtgtaagccattttcaggactccagaagaagtcgatgcgggcgtagttcgttaagccaagtgcttgcatagcatcaagtgccatttgtttcatggcttcgtgcacatcatcaggtaaatcgtttggtggtgtgacaaattgagtggtatttccagtcacgaatttgtgctcaaagtcataccaaccgtcattaacgacgatttcaatggcaggtaatggttgaccattaatcacgccaagtgagaattcgcgacctttaatgaattcttcgattaaagcctcgcggtcgaaacgaagtgcatcttcgacagctggttgtaactcagcttcgttgtgcacgatatgcgtcccaacacttgagccaccgttacttggttttaccacgacagggtactcaaatgggatttctggcatgggttggtcgcgataagcagcgacaaaccgagcagttggaatttggttatataataagatttcctttgaaacctttttactcattgtaatacctgctgcgagtgtgtcactaccggtataaggaattccaaagagatcgagaaccgcttggactttaccgtcttcgccatcgccaccatgaagtgcgaggaagacaatatcagcagttttacaaatctctaagacattcgggccaaagagttgtgttgaaccatcagtacgtaatgcgttgatggcgtcgtctgttaaaacttcgtcgctgatgtcgtaatctttttcaacaggtgttgaagaataaagatcatcgattgatgcgacgtcgtgcaaatcatttcctaagaaaagatcaacgaaagcaacgtcatggcctttcgtttgtaatgcattggtaattttgtgtccagacgttaatgaaacgttacgttcggtactacgcccgcccgctaagacaacaattttcatatgaacctacctccgaatatttttggaaccttaagtatagcacaaaaccatattaggcgggtatcaaaaagctgaaaaatcagtggtctagtttaaaaattggcactcaacaacgtcgaatgctaattacttgcatttcatgattaacggactagaatagagttgtaaagattaagaaaggaagttttagagatggcaaacgaattaatgaatggtcgtcaaaattggctagataattttggtggagatgattggttcaagaatttcggtcagcaattattggcaatgtcgcctgaaacggacaacttactcaaaacagatgttaaagagaccgataaggattaccaattagcggttgatttaccaggactggacaagaaagatattcacgtggattatcaagataatacattgaagattagtgctaaacgtgatagtttcgctgatcatagtgacagtcaaggcaatatcgttcaaagcgaacggcattatgggcgctttagccggcaattctacctacctggtgtcaaccgggatcaaatcgatgcgcaatatcaagatggcgtcttacaattaatgttaccgaagttaagtgaatcagaccaaccaacgaacccaattgaaattcgttaattaaaaaagcggcaccaaccataaaatggttggtgccgctttttgagttatagaaaaagagaggcgtaaaacaatatgagacctgctacaagagtacaacatttaaatttggtgagtaaggcaatccgccgctgttgaatgggtgaatcgagtgggagtatgacgacttttaattcattttcaggatgcgcttgtagataggctttccaaaaagtatgctgtgcttgaaaagtcggcaacttaaggtagagaaacgcgataaaaatgaatgcactccccaaaagacggattgcaatgttcagggcatctagatagagcgctgttagacagccaccgattgataaaaagaataaaaggactaaccaagatgttaaaggaacagcttgcttgtaaaaggatgcgttgaaataagcttgtttcattgattgttgcactttgtaagcttggtcatccgtgtcaggatattggtccaagaaattttgcttgagtgttggctttagcatattgagacgcacgataaaataagatgaactgatagctaacaggcaaccaataacagtgagaaaaaaggcttgatttggggacaaaataatacctcctaataataaataattgtagtatagcaaatatttttcaactattaagatttaatcagcaaaagcatcctattccggttagctacacaagtcaaacgattgcttacagcaatcattcgccctgttaggctaatcctcacaggataaccacttttgacgcacttctattttttgtgtttcttgttcagaatcttgtcgaacaagttgttgtcttgtgggttaactgagtcaccacttgcgactgcaaatgcttttagcgcatcacgttgtttactgttgagggtctttggtgtcacgatgttaactgtaacgttttgatccccattacctgtcccgtggagcttaggcgcacccttaccacgtagacggaagacagtattcgtttgagtccccgctggcacttttagtttaacaggaccatggactgtgttgacttcaatttcatcccctaaagcagcttggacaaagctaattgggacttctgaataaatttgtgcaccatcgcgcttgaattcagcacttggtgccacgcggaagacgatgaataaatcgccataagggccaccgtttgtgccggcttcaccttggccttgaagacgcatttgttgcccatcttcaacacctgctggcactttaaccttaacagtatgccgttcatcttcgtgacctgtcccatgacatgtttcacacttgtctttaatttctttaccagtcccgccacagacatcacagacttcttgagccatcatgcggccgaaagctgtttgccgttcaacttggacttgacctgcgccgtgacatttgtgacacgtttgggcgcttgttcctggtttagcaccagagccatgacacgtgtgacattctgattcacggttataagaaatcttggtttctttgccgaaaatggcttcatcgaacttcaaatccatccgatattgtaaatctgaaccttgacgaggagcgtttggttgttgccgagcaccgccgccaccgaagaatgaactaaagatatcttcgaaaccgccgaagccttcagcaccaccaaagccgccaccgaagccttggcctgcgccgccgccgaaaccaccgttcataccagcatgaccgtattggtcataagctgcccgtttttgtgggtcacttaatgcttcatacgcttctgtgacttccttgaacttggcttctgcatctggggctttgttaatatctggatggtacttctttgaaagtttacgataggcctttttaatctcatcatctgaggcgtctttacttatccctaagacgtcatagtaatctcttttatcagccattgtgggcctccattcatatacttacgcgttaaatctatcctatcaaggatagcataattgactgattaaaaaaagccaaggccctagaccatactaggttttggctttttttaaaacgcattattatttgtcgtctttaacttcttcgaagtcgccgtcaacagtaccatcgtcagacttaccgtcagttgcattaccttcagcaccagcagcttgttgtgcttcttgtgcttgttgatataacttaactgttaattcttgaacgatttcactcaacgcatcgcgttttgtcttcatgtcttcaaggttgttttcttgttgtgctttgactaattcttctttagcatctttagccttttgtaattcttcgtcagaaactttaccttcaagttctttcaaagtcttatctgtttggaagattaattgatcaacatcgttcttcaaatcaacttcttctttacgtttgttgtcggcttcttcattttcttgagcttctttcatcatgcgatcgatttcttcgtctgataaaccagagttactcttgatagtgattttttgttctttatttgtgccaaggtctttagcagaaacattaacaatcccgttcttatcaatatcgaatttaacttcgatttgtggcacaccacgaggtgcagcaggaatatctgttaattggaaacggcctaaagtcttgttatcagcagccattggacgttcaccttgtaagacatggatgtctacggcaggttggttgtcggcagctgttgagaatgtttgtgccttgcttgtaggaattgttgtgttccggtcgattaacttcgtgaagacaccgcccattgtttcaatccctaatgataatggtgtcacatcaagtaaaacaacatctttaacgtcacctgagataacaccaccttgaacagcagcaccaagagcaacagcttcgtcagggttgattgagtgatcaggttccttgcctgtccagttcttaacagcttcttgaacagcaggaattcgtgttgaaccaccgtttaagatgactttgtcgatgtcgcctgattctagaccagcatctttcaaagcattcataacaggtgcttttgtccgatcaactaagtctgatgttaacttatcgaattcagcacgtgataaagtcatttccaaatgtaaaggaccgttttcgccggctgagataaatggcaagctgatttgggtgcttgtcacaccagataaatcttttttagctttttcagcagcatcttttagacgttgcatagccatcttgtcttttgacaagtcaataccgttgtctgatttgaagttttcaactaaccagttcatgatggcttcatcaaagtcatccccacctaaatgtgtatcaccgtttgttgataatacttggaagacaccgtcgcctaattcaagaacagaaacgtcgaaagtcccaccaccaaggtcataaactaagactttttcgtctgtttctgtcttgtccaaaccgtaagctaatgctgaagctgttggttcgttgataatccgtttaacatctaagccggcaatcttaccagcatctttagtggcctggcgttgtgaatcattgaagtaagcaggtactgtgataacagcttctgtgacttcttcaccaagataatcttcagcgaatttcttgatgtattgtaagatcattgctgaaacttcttgtggtgtgtatgatttgtcgccaacagttactttgtaacctgcttcgccgatgtgacgtttgattgatgcgattgtatcagggttagtgattgcttggcgttttgccacttcaccaacttggatttcgccgtttttaaatgacacaacagatggtgttgtccgtgcgccttctggatttgtgataatttttggttgtccgccttctaatacggcaacagctgagttggttgtccctaagtcaataccgattactttactcataaaaaataccctctttttttagatttttagtttaatttattgtgcaacaacgaccattgctggtcttaagacgcggtccttcaagtagtagcctttttggaagacttgtacaacagtatccgctttttgatcaccatcaacagcgaccgtttgcacggcctgatgaatggtcggatcaaaggcttgtccttgcgcctcaatttccttaacgccatgatcttctaaagcatgtttcatatgatcgtatgtcatttgaacaccctttttaagactctcagcactatcatcagttgcttcagttgccaacgcacgttctagattatccaaaacgggtaagacatcttttgcaagtgattgcccatcatattttaacaagctagcttgttctttttgatgacgggtttgaatgtttttaatttcagcttgtgaccgtaagaaactatcttctaaatcatcatatttcttttggagttcagcaagttgagccgctaaatctggcttagctgcatcttcgtcaggtgcagcatcttcgatcacttcatctgcttctaattcaggttcaaatggcgtttcttctttaggtgtttctgtttctggcatttctgctactggcttttcttgtttctcagccttttcttgcttggtcaaacaaacacgctccttttaagattgatcatcatcgaaattcgcataataatcaattaatttcttcgctaactcttcacggaataaatcgagtaacccaatcatccgcgaatagggcatactagtggggcccagtagtgcaatgactccctgtccgtgttcaccaacgtcataattaacagtcattagactataatgtttcaacagatcgttggccatctcggtgcccaggcgaacctgaacttggctattggcgcctccaggggacaaatctagcaacttggctaaatcatctgaacgattaatcatgttatacaacgacttcagctgggtgacatcggagaactctgaaaaattcaacaagttcatctgaccgccaacaaataagcgctcttgactcgcctttttcaaaacatcgtcgaagatgtctaaaaagccggtcggagaagccatgtactgggctaatagcgccggtacatccgtctttaacttctgactaaccacggttaacggtaagccaattaggtgatcattaatgattcgaatggctttttcgagttcatcacccgaaatcgcttgtggaatggtaaatacctgattatcaactgtccctgcactcgtcacgataatcgccatcacttggtgattactcaacggtactagacgaaaaccagttaaccgaatctcagccacttccggtcctaacgcgattgctgtatagctcgttaggttcgataagatattagccgattgtgagacgatttcatcaatcttatgatagtgctgtccaaatgattgttggaccgttgccacatcaaccggattgagggttgctggttgcatgagatggtctagatagtagcgatagccttgcatcgacggtacccgtccagatgacgaatgcgtcttctcaattaaaccgacactttccaaatcagccatatcattacgaattgttgcagaactaacgtgtaccggcaattctgccattaacttcttagaacccactggctgaccactctctgtaaaaagacgaataatttctttcaaaatcattaattgcctttcggtcagcatgtcatcacctctttttagcacttgaatatcatgagtgctaattacaattattaatatagcaagaacgtcaaataaagtcaagaaacgtaccggcttttttacggatttactgaaaatcggtccttagacggagggccttactggaccaaaggacaaaataaaaaacgagccgcttcttagatggaagagactcgctttatgaagtggaatatttataacgtgcttttcaaaccatattcctgtgcctagcgacacaaggcgaatgctcagaatatcccccggtttgaacgcactcaataactatctagcagaaactcttggaagacttcattgcctaagaacttacctgattcagttagtcttaaccaatcgccttcttgtttgaggtagccctttgcaatttgggtggcaactgtttcgccgtaaacattttgtaatggataattgaatttatcttgaaaatgactgatggatacgccttgcatcgtccgtaacccgaggaagagttcttcctccatttgttcggtcagtggcagaacatggcgttcaatgactggcaccttattttcttttaagggttctaggtattgttggattgggccgaagttatggtaacgatccttacctaaatagccgtaagcaccggcaccaaagccaaaatacttttcattgcgccagtaagttagattatgcgcagattgaaagcctggcttggcaaaattactgatttcatattgatctaagccagcccgcttgaaactatcaatcgcggcttgatacatatgtgcttcaacatcttgcgatggtaaatgcaacttgccttggcgcatcaagttatagaagattgttttgcgttcgagaatcaatgagtacgtcgaataatgcggtaagtcgagttcaattgccttattcaaactatccatgaaatccgcttcactttgttgtggtaagcggaaaatcaaatcgatactcatattttcgaagccgaccttgcgcgcgttatcgattgcccgataaacatccgcacttcggtgaatccgcccgatctgttttaaaatctgatcattaaacgactgcacgccaatacttaaccggttgacgccgttgtccttcagaacttgcaatttttcagtatcttgtaagtcattaggattggcttcaaacgtaaactcaccaccctcataaggtaagtattgatgaatcccatcggttaaacgttggagttgtgctggtgataaagtagttggtgtccccccaccgacatagatcgtatcaattggttcgtctgggtattctgccatcactaattgaaactcgcgaatcaacatatcgacataatcatcgaccggttgaccttcaatgaaaaccttattgaaatcgcagtagtaacaaatatgctcgcaaaatgggatgtgaatataagcgcctgccattaatgttgtgcctctaatttctcaaaataagttcgggtatcggcttcgtcttggtggagttggtcaatcaaggcttccgcggagtcaaacttcacttcgccgcgtaagtagtgataccaatccactttcacttgttcaccgtaaatatcgccattgaaatctaataagttaatctccaccgttaccgggttattgctgtggaacgtcacattccgaccaattgaagccatgccaatataccattgaccgcgcactaaaaagcggaccgcataaatcccaattcctggtaatcgttctggtcgttgcgattcgatgttagcagttggaaaccctaattctcgcccgcgtgcttcaccatgcactacttcaccggtcgtttggtaaacataaccgagtaattcattagcttccgcaatcttaccagcatctaaatcctctcgtactaatgtcgagccgattttgacaccattatggtcatgttctgcaactgtcacaatggcaaagcgccctttggcatagtctgacaatgtcgtcatattcgcaatctcttttttaccataagtgtaatcaaagccagccaccactgtatccgcatgtaaagcgactaagtattgatcgacaaatgtttgtggggctagttgtgcaaatgcttcattaaagtgcacgatgtagaaaacatcaacgcctaactccgccatcaattcttgcttgcgctcaaccgttgataaataacggaatgactcccgattggcattgcgataaacaatggcaggatggatatcaaacgtcatcacagctaatagtaaacctttttgaactgcaatttgttttgctttccgaattacagcttgatggcctcgatgtacgccatcaaaaaagccaagcgccaagaccacttggtcagctggcacttgttcttttgaatatggatgaattaattcaatgacacgcatatttttcacctagttttttttaatgagtcccttgattttgtaaatacattttataagggcgataaagatgttgcgctgctttttcaacttgatagagcgccttgatatgcccttgataggtcaacgccacaatctcatcggtttgttctggcaatgtcaagaacacaccgtttaaaagcttggcccattgatcgtcgtctaaagcaatcttcttgtaatcttcaaatacatggtcaattggcaataaaacgtctgccagttcgcccgcttcagctttttgcgccaattgttccaacgtgatacagttaccaatttgaatgccgccactcttaagacgtgtcaaatcggacatcactgcgggtaaaccgagtttacgaccgaaatcaacagctaatgtgcggatataagtcccctttgagcaaccgacaatgaaccggaatgtttggcgcccagattctgcgtcaaattgtggttcaccatccaaatcaaactgcgtaatcgtgattgaacgttgtggccgttcgactggatcaccagcgcgcgcatagtcgtataaacgccgcccattgactttcaccgctgaaaacatggggggaatctgaattgaatcgcccagaaaactagcgagggtctctttgattctctcagttgaaaaaggttctgttaagcgcgcctcttcaacgacttcaccatctaagtcttcagtcgttgttgataagccaagggtgatttcacccgtgtagactttaccagaatgcaccaattgatcaacaaccttcgttgcttgaccgatacagattggtaacaccccatcgacgttgggatccaacgtgccagaatggcccactttcttcatgtgtaaaatgcggcgcactttaaacacacaatcgttactcgtcatgccgcgttctttatataagggtacaatgccgtccataagtaatctcctttaagtattaactaaactattatagcatagagtgtgaagtcgaacgggattagctttatgatgctgctcaatttattatcaaagcacaaaaaaagatgggacaaaagaaactcttgcccatcctcgctcaatgttgttttattagtaaccttttttactcagaaaaagtgagtcctttattttgaaaccgactatcgatcctagcactttttaattcgatcgcaaaaataatctctttttcctgttcttctttggataaactctcaacatagcctggtacttgtttttgataggcctctgctatatcactaaaacgatactgagttcggtataccttgagccggttactcgtgattcacaattcttcactagtcggtagcgtaaaaattgcggctcgccccaaatcgagttcactgactttcgacgcttcggggtcggtgccaaaataccagacattcggtatcccatcaagcgtgacaaaattaatctgtcgactagccggttgtcccaggttgttcgctgtactcagcaccattgtattaaactgcttaacatatttacgaaactcgcttaagttattttgatacagctctgaactaaccggctgactatcaatataagcaatcgcatcatcaatcgtttctaatgccgggttagcctctaaataataaagaatctgtggaataatgtgggatatttctcgttgataataataaaactgcaaccagcgattagatactgataaggcctctgtataacgcttaacaattcgccgccgatagcgttggacgatatattttaacggtcgatatttaatcaacttttgaaagagcgctaaactcaatagaaagattaaaattgcaactaaaatattgattttaacaatcccccatcatcggccagtgttcatactgcataaaaacattatacagtatcgtcaaaaaaggcgtgaccaccgccgcacaggcaattactaatcgccgtttaaaaacgcggcgtttatgggtcatatcttcgattattttttggcgttctttcatggtccgctcacgagtaatcatctcatcaatcaccacttgatctgcttcagaaatcatcggcaccctcctcaaaagcatcaaagcgttggcgtaattcatacgtccccacatcagcaaaatcagaaataatgatattttgtcgctgttttcgcatgtctgctgcaccatatttagcggtatacatctcctcagcccaagcgagacgtttctgtaaccgctgttcatcaaatgttttaacgacgccttttctaatccgatgttatttcactttattcattaaataaagactgataaagaaggctgcaaaagcaatgatgtagagcaagaaaacataattggttcgttgcaatagttgtttaaaagctacgcgattaatcggaatgcgcgtttcacgagttagatagagcgcaattgtactcgaggtcggtacaaagcacattaaccagccaatcccaattaacactgattgacgcaaatgatgacctgttttttgagtggtaaaaaaccaatcaattgtaatctgatcttcgcttagctgatgacgaatataatctggtttactcatttgaatccttcccttctggttttccagtgacttcagtcgaccgttttggtgatttccatacacccgcatctttacctcgaatgatttggcgaatcgttggcacaatttcgactgctacggtatatgtattaaccatccaataaatcaagatataccaaggcgcaaaggcgatatacttcaacgaacggccgccatcgttaaagtaagacgcttgtaccagctgaatcaaccctaccaatatctcgattgtgatgaaaatccctgaaaatgacagatttgagagtagccgatgccaatcatgattaatcagataacccatttgaagcactacaaaggtcaccatactcatccagtaaaataacgaccaaataatactcaaaccataatcgataatacttggcaccatcgaaaagtgcttaatcgggtgccgtaaaatgctaaacgattttgttaagagcacgtaaatcccaccggaagtccatcttcgccgttgcttaacgagttctggtaatgtttctggcacatccataaaaaagcgaatgtgcggtgcaaaatatgcttgccaccctgcagtctgcatatcccaagaaatcgcaatatcttcagttggttgttctgcctgccaaccaccgacatcgatcaccgctgccttgcggtacatcgtattcgctccagaaaaggcaaacagcccaccgtaagaaagttgcgaccgtttaattaagccaataattgaatttaattcattttgttgagcttctgcgactagcgttgtcttattaatcgacaacatattaccagtcacggcgcctaattgagcgcccccttcccgctcaagataatacatatacttccataaggcatccacttcgggtttcgaatcagcatcgttggacagaataaattcacctttagcaaatcctaaagcactattaaaacccgccgcttttccgcgattattaataatcgtgagcgttcgcaagtgctgcccatattttgcttgtaattcttctaaaataatgccagttctatctgtcaagccgtcattaacgacaatgatttcatagcggtcagttggataattcatttgtgtcgctaaatgatcaatcgtcgcctgaattgacgcctcttcattgtgggctggcactaaaatcgtaataaatggcgtctcctttttaagatagcgtggttggtcagccttttccatcaataaccaataatataaactagagacaataagcgataagcccccaataatcggatacgaaacgagcgtatagattaatatttgagttaaatagtctgtcaacaacatgtaagcgtcctcattttagattggattttaatcagttaacaatgaattcacattatataactcacttgccgcgctaaaccataaaatatctgccaataacaatagtttcattaattcaatagtaatatggtgcaaacgactaagttaatttaatagattatcgcttccataaggtcattcaagcaaaaaaagagccccgctttcgcggggctctttttcacagtttaacgctgtgcttcatcttcgtgtaacttacgtaaaagttcgtcgatatgttcaccataacgcactgaaccgtcttgttcaaaggtgatttctggaatcttgtacaacttaatccgttggccaagttcgctgcgaatcaatcctttagctttatctaagccagcttgtgtcttttcagcgtcacttgctaagccagataaaatgctgtaataaactttaacatgttgtaagtcaccactgagattaatatcagtgattgtgaccccttcaactcggggatcacgcactctttttaataaaatgtcatttatttcgcgttgaatttcttgttcaacccgaccaacacgatgtttcattgcttgtcctcctgtaaattaattatttaacaggtacttcttccatcacgtaggcttcaatttgatcatcaatcttaatatcattgtaatcttcgattgtcacaccacattcaaagccagttttgacttctttaacgtcatctttgaaacgtttcaagcttgaaagtttaccttcataaatcacgataccgtcacgaattaagcggacaccactatcacgttggataacgccagtgtcaacgatacaaccggcaattgtcccgatcttagaaacattgtatgtttcacgaacagttaattgacccgttactttttcttcgtaaactggttctaacatacccttcatagcagcttcgatttcttcgattgccttgtagatgattcggtgtaaacgaatatcaacttgttcagcatcggcttgaatcttagcttgtggtgttgggcgaacattgaacccgatgatgatggcgttacttgcagcagctaatgtgacgtcactttcgttaatcgcaccaacggcttcatgaataatattcacgcgcacgccttcgacttcaatcttccgtaaactaccagccaaggcttctgttgaaccttgtacgtcggctttgataataacgccaacttcttttaattcgccttgtttcattgtttcgaacaagttatctaatgtgacagggtttgaccggctacgttccttcaagagcgcacgtttggcacgttcttcaccagcagcacgagctgttttttcgtcttcaaagacaacaaaacggtcagctgcttgtggcacatcatttaacccagtaatttcaactggttctgatgggaagacttccttcacacgacgaccgcgatcatttgtcatgacacggacacgaccaaaggtattcccaacaacgattggatcaccaatcttcaatgtcccttgttggatcaagagtgatgcaacaggtcctttacccttatcaagacgggcttcgatcactgtcccaaccgctttttgatctgggttagccttcaattcaagcacgtcggcttcaagaagcaccatttcaagtaattcatcaatgttttcaccagtcttagctgagatcttaacaaagatggtatcgccaccccagtcttcaggaacaaggccgtaacccatcaattgttccatgacgtgatctgggtttgcgcctggtttatcaatcttattcaccgcaacgatgattggggctttagcagccttggcatggttgatggcttcgattgtttgtggcatcacaccgtcatcagcagcaacaactaagatgatgatatcagtgatatcagcaccacgcgcacgcatgttactgaaggccgcatgtccaggtgtatctaagaatgtgattaaacgatcgtttaacttcgtttggtaagcaccgatatgttgcgtaatcccaccggcttcaccatcagtcacgtgactgttacgtaagttatccaataaggttgtcttaccatgatcaacgtgacccatgattgtgacaactggtggacggctcacaaggttggcatcactcttagcttctgtttcaaatactgaatcgatatcagcaatatccacttccactttttgttctgcttcgatgccgtaatccgttgctaataattcgattgtatccttatcaagtgattggttcatgttaaccataatccctaacatgaataacttcttgataatttcagctggttcacggtgaatcttcttagcgatgtccgcaacgttcatgccttcagagtaaactaatacttctggtaatggccgttctttacgttgtggcatttccttcttagcagcattttgttcagctaattgttgcttacgggtcttcttacgtttcttattgaaacgttgttgattgttaccgtagctgttatacccgccgccacgtttcttatctggaccaaagttctttggcttgcttgctgtattgtttgatgctggtttagcagcactcaccgtattagcttgcattttttgttgcatttcttgtgccgaaactggccgactttggttcgagttgttattaggacggctgtttgtattgtttgctggacggccgttgttattgctgtttgcaggacgattatttgttgtcgttgggcgtgcgccggctggcttgttgccggctggacgactgctgttattaccgtttggtttagcagctggccgtgggcggttactttgttgacggcgtttcttttcgtctgcttcgcgttgttcacgttgttgttgaatgcgttcttgcgttctttgacgacgtgcattagcttgtgagatttgttcttgcaagctcaatggttggtttgacccagctggacgcgtattgccgtttgtccggttagccgcattattgttagggcgaccattattaggacgggcgttattgttgttaggacgaccattggcattgttgcggttttgaccatttgatgcttggccattccggttgccttgtgggcgttggttgtttgaacgaggtgctggtttgctgctagcttctggacgacgacggatagcggctttgttaatcttaatcttaccgttatctgttttttcgcttgcctttggtgcagcaggtgctgcggctggcttgctgtcagttgtcgttgcagctggttttgttttcttatggaagatggctctcaaagctttttcttgattgtcatcgatagttgccatgtgattttttagatcgtaaccttttttaacggcagtttctaaaagatctttgctggcaacgttaatttcttttgctaattcatagatacgttttttacccatatcttcacgctcctttattatcccagtagcgttatcatctttttggcaaacccggcatcaacaaccgcgatggtggctctatgtaatccaattgcttgggttagctgggccgcggtatacgcttttgtttccgggatttcgtagaaatgactcttgtcagtcaatttcttctgtgtcagttggctaatgtctgagccgataaaaaccaatttcgctttttgctgctgaatggcttttaggacttgttcttcaccactgaccagttgccgtgctctcatgcaaatacctaagagttgtaataaacggtctggttgttcactcattttcgttctccaaataattctagccgagccttttgatgatcaacatattcgaataattctgtataaaatgattctgcaacgtcaatcccaaacgtcttttctaaaattttcttgctttgggcggtcttgattgcatcaggttctagtgaaacataagcgccacgacctgatttcttaccagttgggtcaatactaatctcaccttcggcagtctttacaatccgcaccatttcttttttaggcttcatttcttgcgaaataacgtcttttctcattggtacttttctttgtttcatcatgaacacctcacttattcttgtggttgttcttcagaatcaacagcagaatccgttgcttggtcttcgaagccttcaacagcttctgttgtttcttcttcaaaaccttcaacgactgcaccttcatcttgactatcgtcttcatcaacgaattcgacttcagattcaggtttgatatcaatcttgtagcccgttagcttcgcagctaaccgtgcattttgaccttttttaccgattgccaatgacaattgataatcagggacgatgactgtacatgtatgttcgttatcaccgttaaattgaacagcgatgacttcggcaggattcaaggcattggcgatgtagtctgaaggatcttcttcccacttcacaatgtccatgttttcgccgtgtaattcattaacaactagttgaacccgttgtcccttaggcccaacacaggtgccgactgggtcgacgttggggtctgttgaacgaacagccatctttgtccgatcaccagcttcgcgagcgattgagacaatttcaacggtgccgtcataaatctctggaacttcttgttcgaataaacgtttcactaaatcagggtgtgtccgactaacaaagacttgtgggcctttagttgtattttccacttttgaaacgtaaaccttaatccgatcatgtgcttggtattcctcgtttggaatttggtcttgcttgcttaaaacagcttcgatcttgcctaagttgacatagatgaacttgttatcgcggcgttcaacgaccccttgcataatttcgttttcgtattggctgtattcattgtaaatgatacttctttcagcttcacgaacccgttgcataatcacttgtttagcagtttgggctgcaattcggccgaagtcttttggtgtgacttcaaaacgaattgtatcgcccacttcgtatgccttgttaatttccaaagcatcttggtagctcacttcaagacgtgaatcaaacacttcgtcagtgacttctttgacagcatagacgtggatgttacccttcttttgatcgaattcaacttccacgttttgtgcttgaccgtaattccgcttataagcagaaacaagtgctgcttcaagggcttcaataacaatctcttttttaacgcctttttcttgttctagcgcatcaagtgcacctaacatttccttgctcatgtaactagcctacctttactaaaattcaattgctaagcgagctttggcaatttccttacgattaaacgttacttctttttgacgcgttttaattttaatcactaaagttaaagtgtcatcatcaagggcttttagtgtaccttgatagattttctcgccatcaacagcttggtataacgagatatgaatgtattcgccaagtgctttttggaaatcggcttccttctttaaaggacgctctgcaccaggtgatgaaacatctaagaaataagcctgcggaattggatccgggtcgattgaatccagtttctcacttaacgcatcgtttactaaggcacaatcttcaaggtcaatgccatttggtttgtcaatgaagacgcgcagataccaactgctaccttctttaacaaattcaatgtccactaattcaaaatggtgttgatcaagaatcggcacgatcagatcgtgaactgtttccacaacggtactcaaatgattccctccaattcatttttatatttcagattagacgtgctccaataaaaagagtgagcatttctgctcactcgctctgaagtatctaattactgataacaatataccatatttttcatgaaaatacaaacaaccgctttaattttcagtggttgcgacgctattttgcgtcttacccgtcgtcaagatttcatggaagttttcaaaactaatctcgaccatgttcttgagggcttcatcagtattcgaaccaacgtgtggcgtcaacaagacgcgggggtataaatcaatcaattcttgagtggttgcatctggaacaggttgatctgctgggaattgcttgaagaagatttcgccttcagctggtaacacgtcagcggcgaatgcaccaagttgatcagctttcaaagcatcgataatcgcacggttatcttgcaattgaccgcgggctgtattcaccaagattgcatcgttcttcatctttgcgattaagtccgcattgatgaattggtcgttttgaccagcgaagtatggaatgtgcaagctgacaatgtcactttgggccaataattcatccaagctgacaaaatcaagcacttccttggcgatttctgatggatataagtcgtaacccacaaccttggcacctaagcctttgtataacttcgcttcggtgtagccaatcttgccagtcccgataatcccaaccgtacagttgcggacttctttactgaacatcacagggctcacacggaaatcatgatgggctgtccgattcgttgtataagtggtatgccgcaataatgacatccctagcgtcaatgccaattcagcaatcgcgtttggtgagtaggctggcacgcgagcaacttccatgttgtacttgcctgctgcggccaaatcgatatgaccgtaaccgactgtccgagtaaacacgtaacgaatcccgtattcattcaacttcgctaagttttgcgcatcagcagcacagttcgcacgtaacaagaccgcatcgtggccttttgccgtttcgatattgtcgtgagtcaataagtcttcaattaacgttaaatcataatcgtagttgttatatttattgaacgtcgccacttcattcggacgaacgccgtaacaagcaattttaaacatttaatttccctcttcctagaaaatcccgatttggttaatcacttctaaaatcactaaccagactggcgtcatcacaacagctaagaccgttgataataatgacgcgttcgatgccaagaccgcatccttgtcaaaactaatcgcgtaagcagcggcgaccgttgccgttggcgttgccatcatgatgacaatcgttgccaaactgatgtagctgactggtaaaatgtgagtcattgttaagatggccaataacacgatatttaaagcaggtactaagatcactttgttaatactataaagccatgatgtcttgtccgaagcagcttctttgaaactgatttcgccaagtgttgtcccaattgctaaccaagctaatggtgaacataaaccagctaagtacgtcattggtttgaacaaccatggcgctgtttgatcaattcgcaagaaggccactgaatgcccagcaaccgccacttgtggtaatgcgccttggattaaccagatgattaaccccgcaaatgtggcgatcacgattggatttaagaacatgtttttcaagttcttcgattccatcttcaagccactcatcttgatgtacccatatgagtataagaacacgcgataaccaatgttgaaaattgagctatacataacccctttagctccgaaaacggcgccaacaattggaatcccgaagaacgttgttgaaccaaagatggtcaacacgcgcaatgtatcttgttgatcacccttaaagcgtaagtataacggttttgaaattaaaattaaaataatatagatcaagaagccccaaactaaaacgttgatgccttcttttaaagtcttcccattaatatcttgcatgaatgagttgaatgccaaagctggtaaagcaaccgttaaaacgacttttgacagaatcttcccaaatttatccgtgaagatctcgcgtttgcggcagtagaatcctaataaaataataaacactgtcgacgtgatcgaactcacaatatccatgttcgtaaacgtcttcgttaaaatatcgccaatactcatctgtactctcctctgttataacatttagtccgctgtattataacacggacaactggtatcgattataacaagaaagtaacggaaaagaaatagggcaaaagaaaaagagtgaaaaataacttcactctttctcagacctaaattttgtattcattttcattacatgctatatattaattatctaaactgccaaggaggccttctcatgcccagacaaagcatcttcaacatgtctctttccaaaatctaccccatgctcgtccaaaaagccgaacgcaaaaaccgcacccaagccgaagtcaatcagattatccgctggctagccggctacacccaaactgaactcgaaacccaactcgctaaagacatcccctaccaaacgttcttcgaagaagcaccgcagatgaacccaaactgtaatctaatcaccggcgtggtttgcggcgtccgcgttgaagccattgaagacccactgatgcaaaaaattcgctggctggataagttggtggatgaactggctaaggggaagacgatggagaagatactacgaacctagtaaaaaagagccttagtagactattttgcatagtctactaaggctcttttcaataaagcatactagtcctttggtgccggatacttttcagcattcttaatcaatttttcattgataatctcatcaatatcgaggcccaaattgtcagccatcatgtaactatagaccaacacatctgccaattcttctttgacccgttcaatatcttgaacgccttcttctgccgtcttccattggaataactccaataattcagaagcttctagtgagattgacaatgccaaatctttttcattatggaatggtcgccagtgtcgttcatcccggaatgcgttaattttttccatacttgtttttgtcatcattaaattcctttcttcagagcagcccttaattcatcatcaactgcgtaaatatataaaccattaacaccacgcgatagcagaacattcaattcattgcgtaacatgtcctcagaaacatcttctttggttccgtcttctaaagttcgacgctgcgtcgctttactattttcactggccgttttatcaaaaataatacgtccatttcgatacttcacagatggcccaatgatgacacccgcataattcaagtcaaaaccttgaatcgtaaaagtagagccaacttcgtcaatcgtctgtggttgttctgcccatgctaattttttattacgtcttttctgatccttgtcgtcaactggtacctgtaagttccacggcatttgccaatcatcaatcttaacgtaccatggatgaccattattatcttttccattcacatatttccaatcaaacgttgctagaatacgtgaaataccagaatcctcgttcttagctttagtttcaattgcgttttgtaatgcttgtggagtgtcaaacaacttaatctcatagcctttttcgtcatgtttaggtaacggtttaaccattcctcggtcgattaaacctctaatccatccaatggttgccgctccagcattaattctgagctgtttatttaatgtgaccaagttgccttgttgttcaacctcatctaaaagattatctagctgaataggttcccaatactgttcccgcgacagtatttgctttttatcaaagactgcgaccaccactcgtgcacgtttcaataaatcatcaagttgatttttcccagtatatgattgctttccttgagttaagagtaagtgtgcttcatcgacaatgacaacatctaccggttcgtttactgaatatttattgataaacggcgtcggttttaaaactgtcttttgcttatcactcgtgtaaatatctaatttttgagcaatttcctcgtaaactttcaattgctgatcatgattgactaacaagaactggctagtccctcttaaaatgggattttctgattcagcttttgaaagctgatttaattcataaaataggctactcatcaacactgtcttaccagaccctgcgtccccttcaacaatgattaacttgcctttttctgtccggttcttcaaatttgtttcaatcgttgcaataatcttatctttagcatctaattgttcatccgttagcttatgaaatggtgaggctttaaaaagcgccgaatcacgaatcgttctttctaacggaaagagtcttttatcaaactttcttagtttaagccagatttcggaaaaaatcttttccatttcatcatgcgaataataaagattctgttgatttgttcggcggttattgactcttttgacaacatcaacacttgccatgtattgcatcattttattttcaatatctagcgtcatcgatttattaaaatgctcatgaccaatcacatacatttcagcagtgtttgaatggtttaattcccaccaatctgctctatctttcgaatcattcgttatgtgttcgactgtccgtcgtttaatatcagttgtttcgcctacatagaccgaataattatcctgtttatcggcatccttaacaatgtatacagttggatatttcaaaatataggtttcgtcttcttcattaatttgcatttgatcaagtgctttttgattataggcagtgtcataaataattggttttaaatgggacatttaaaattcctccgacagttcaacttaactaaattatactatttatcgataaccattaaaatagcccgcctaaattgcattcacaatctagacgggctattttaattacatcatatcaaacaacgataactgattttcatcaggcaggtcattcaatacgttattttctgttaggtattcgatcagtgtcttggaaactttcccacggttggataagtcttctttagataagaatggcttttcttcgcgggcggaaacgatttgtttggcgacgttaccgcccagacttgggacggcacggaatggcgcaagcaaggtgtggtcgtcttggatcaagaagtcagatgaatctgatttttcgatgtcgaccatcttgatgttaatcccgcgttccaaacattcgttggcgatttcgagaaccgtcaacaaattcttttccttggtgctggcttccatccctttatcggtgatttccttcatgcgcgctttgacgccttctttaccttgggccatggccacgaggtcgaaatcttcggcacgcacactgaagtaagcacagtaatagataattgggaagtacaccttgaagtaggcaatccgcaacgccattagaatataggcggtcgcatgggccttggggaacatgtacttaatttttaggcaggaatcaatgtaccagtctggcacattttcgttgtcgcgcatggcttgttgccagtcatccggaatccctttacccttacgaacccgttccatgatgttaaacgacatgctatcatccataccccagtgaattaaatccatcatgatgttatcacgacaaccgataacgtcttttagggtaacaacgcctttgttaatcagttcttcggcattacccaaccaaacgtcggtcccatgcgaaaggccagaaatttgcaataattctgagaacgtcgtggggtgcgtttcttcgagcattccgcggacaaaccgcgtcccgaattctggtacaccgagcgtgcccattttcgaattaatctgttctggcgttaccccgagtgaatcagtgccggagaacaaggccatcacaccaggatcatcggttggaatcgtcttgggatcaatccccgataaatcttgcagcatccggatcatggtcggatcatcatggcccaggatatcgagttttaagatattatcatggatcgaatggaaatcaaaatgggttgtcttccaggctgcatcttgatcgtcagctgggaattggattggtgtgaaatcatagatgtccatgtaatccggcacaacaatgattccggccggatgttgaccggtcgttcgtttaacgcctgttgagcctttggcaagacgatcgacttctgcgccgcggaaagtttgttcggtatcacgttcgtaggctttgacatagccgtaggcagttttatcagcaaccgtcccgatcgtcccagcgcggaacacgttattttccccgaacaagactttggtgtagttatgcgcaaccggttggtaatcaccggagaagttcaaatcgatatcgggcactttatccccgtggaagccaaggaaggtttcaaatggaatatcatggccgtctttatcaagtggtgtcccacattcagggcagtccttatcggctaaatcgtaacccgaaccgacttcccctttggtataaaattcggagtaatgacagttgggacagcgataatgtggcggcaatggattaacttcggtaatcccggtcatcgttgcgactaaactcgagccaacggacccccgggaaccaaccaagtacccatccttaccactcttatacacaagcttttgcgaaatcaggtagataacggagaacccgttcccgatgatactcttcaattccttatcaaggcgggcctgcacgatttcagggagttcatccccgtataattcatgcgcacgattcatcgttaaggtttgaatttcatcttcggcacccgccatcttcggcgtgtacaacttatctttaaccggtgtgatttcatcaatcatatcggcgatttggttcgggttcgtcaccacgagttcttgggcaatatcggcaccaagaaaatcgaacgccgtcaacatttcatcggttgatctgaaatgaacatccggtaattgtgaccggttcagtggattggcaccacccatcgagtgaatcaaaatcttacgatagattgaatcttctggattcaaataatgtgtatccccagttgcaaccactggtttatccaattcagcacccagtttgaccatgttgcgaatgatttcttcgagtgcttgattgtcgcgaaccaattcacgttccaataatggtgcataaaccgccttgggcattacttcaaggtaatcgtaatacttcgcgcgatcacgcgcttcttggtaccctttttgcatcatcgcttcgaagacttcaccgctggcacaagcagaaccgactaagatcccttcacgtaaagcatccaagcgactctttggcaagcgtggtgtgcggtaatagtattcggtcattgaggctgaaaccagtttaaataagttcttcaacccggcttgggtctgcgccatcaaaatcgcatgcgctggccgtgcttgtttatacgcatcgccaatcccaacgcgatcattcagttgattgacgttgaccatcccatacatctcggccgcttcggcttctaatttgtataacaaataaccggttgattcagcatcggcattagcgcgatgatgatgttccaagttaattttataccgcttggttaatgtatcgagtttatgatttttgtattctggatgaagcatccgggagacttccaacgtatcgatgacgggattttcaatctgaccgagatcgttacgaccatagccagcattgataaagcccatatcaaacgtcacgttatgcccagctaagacggcgtcgcccgcgaattctttaaacagcgctaggacttcggcttctttcttagcaccgtgcaccatttcattggtgatactcgtcaattgcgttgtgaaagctgataacgggtgaccgggatcaataaattcatcgaacgagccaatcacttcgccatctttcattttgacagcggccaattcgataatcgaatcgtaaacggctgacaatccagtcgtttccacatcgaaaatcacgtattcagcatggtcgagtgcttcatcgcgcaagttatacgcgactggcgtgccatcgttgactaaattgacttcgacaccgtacaaaatcttaacgccgttcttcttccctgctgcataagcatctgggaaagcttgtaagttataatgatcggtcaccgcaatcgcggattggccccatttagcggcttgttgaacgaagtcgccaatcttgttggtcgcatccatttgtgacatattggtgtgcaaatgcagttcgacgcgcttgccattttcagcggtatcttggcgtttgggatggctaacttcgaccaaatcattggcattgaccacgagatcgcgcatgaagttatcttcttgaacactcccgcgcaccttgaaccacatgcctttatcgatggctgcgaagatactttcgtcgccgttatcccgggagaatttcttgaccgtaaatgatgatgagtaatctgtcatcttcaaaatcaagagctggcggccagaacgtaaaacgcggacttctttatcaaagacgaacccttcaatgacaacggaacgttcttcttcattgattgtaatcatctgacgggttggttcagcaggatttaagccgcggcccattgaaatcgggccatcgactggtttgccttctgattgacgtttttctttgagtgcttcatttttcttgatcgcttcggctgccgcttgtgcgcgggctgcatcttgttcagccttcttcgcttgaaaatcttcgattgccttttgtgaggcggattcgtcaatcaagggttgaatcgcaaacttgggaaaaccaagccgttgataaccagcttggattgtcgtttgcgcttgatttaagaagaacgtcttcacgatatcgttttcgacaactaaaaagacgttgcgaccgtcgatatagggggtctctttttcacacaattcgtgcaacattgaagattgaatcccactatggttaatgacgtattcccaataagctgctaaaacgccaccgtctaattcggttgcatcggtggtgatttccactgaaacacccgcaatcgctttgaatgctgcttctagatactgttcaaacgttgtgtaaacagcatatggcaaaacggattcgaaatgtaatttaaaagtccaccgtttggatgtttcgtggacaacgacttgttctacttggccagttttgaagccaggataattcgcaacatccgcgggtaaatcaatttgttctaataatttttgaaacagtgcggtttgatctaatgccacaaaagggcctcctcatattcagaaagttaaataaaaggggctaggacaaatatcattctgtctcagccctttttagatgtccgaacatttataatgtaaacgtgctttttgaaactgcctcttgcgcttaactacaatccgcgaacgatcgacgttgtcgctcattcacgaatttaagttaatgcttggagccaaacggtttcaaacgcactctattcctaaacgtgcttttcaagctaactttctgcgcttagcgctgggaatcaaattatcgactgcgtcgttaattcgcttccctgtgctaatgctcaaaagttgaccgagcttgaacgcactctattcagcttctgttgtctctgaagccaataggatacttaatgaattaatcaattcatccttcttcacttctagggtttcacccgtcttacgtaatttaacttcgacgatttcttctgctgcttttttaccaactgtgatgcggattggtaagccgattaagtcactgtcggcaaacttaacgccagcccgttctttacgatcatcaactaagactgagtaacctgcttcttcaagtaagttttcgatctgttcagctaataagacttggtcagcatctttaacattgaccggtacgacatgcaagtcataaggggcaatcgcgcttggccaaactaagccgttttcgtcagcttgttgttccgtaatcgctgataagaggcgactcacaccgattccgtaagaacccatgataattggtttcgcacggccattttcatctaagaaagtggcaccgaattgttcagtgtaacgtgtgcctagtttgaagatatgcccaatttcaatcccctttgtaaagtgcaagttcccttgaccatcaggtgatgtttcgccttcttgaacgaaacgtaggtctgaataatcagctacggtaaagtcgcgcttgctgttgacattcgtgaaatggtgatcggcttcattcgccccaaccacggcattcaccatggcttcgacactgtagtcagcaacgatttgtaagtcttctggcgcgttaactggtccgattgaacccattggtgcgttcattgttgctaagacttgttctggggttgccatttctaagaaatcagcatctaagaagttcttcaacttcacatcattaacttcaaaatcgccacgcactaagaccaagaccggttggtcgtcagcgataaagagaacactcttgatgatttgttgtgctgggacgtctaatttagcagccacttcttcaattgtgtgggcatcgccagtcgctactttttcaagctctaattgcacatcacttgagttttgcttaggacggacactcgttgccatttcaaggttggcagcataatcactttggtctgaataaacaatcgtatcttccccaatttcagcaatcgcagaaaattccattgaatccttaccacccatggcaccggcatccccaacgattgcgcggaagtctaacccacagcgttcaaaaatgttggtgtaagcttggtacatttggcggaaagttgtatccaaatcagtttcattggctgagaatgaataagcatcttgcatgatgaattcacggccgcgtaataaaccgtaacgtggacgatcttcgtcacgatacttcgtttggatttgatataacgttaatggtaattttttgtatgatttgatttcattgcgcaccaagtcagcgaaagtttcttcgtgtgttgggcctaagatgaagtcgcggccatgacggtccttgaacttgaataagttatcgccataggtttcgtaacgacctgattcttcccacaattcagcaggtaaaatccctggcatttgcatttgaacggcgtcaatcttgctcatttcatctttgatgatggcttggatgttttccaagacgcggaatgctaaaggtaagtaactgtaaacaccagcagatacttggtgaatatagccggcccgtaacatcatccgatggctcttagcctcggccgagttaggcacttcctttaaagttgggataaataattttgactgtttcataatctgttatgcctccaaaaataatctaaaagaaaaagcgttgaatatcgttccatgtaaccaagaccattaagacgaccatgatgccgaccccgacaagggtgacaatgccttctttttccggtgagatgggtttaccgcgaatcgcttcaatcacgttgatcacgagcttaccaccatcgagggctggaattggaatcaggttcataatccccaagttgacggataagaacgctaagaagtagacgagcattgtaaagccttgactcgcgaattgcgtcgtcattgaatacatgccgactggtccggctagtttattgagtgaaaaaccacccgttaagaatgacccgagaattttaaaaatctgggtcgcattcgcccatgattgggtgaagccatatttcaacttagcccccacgctatggttgagtccagctgtcacaccaatttggccgactttccccttttgcccctcgactttcaccgctttaggtgtgatttcgagtgacttagtttgctttgcccgtttaacctggacattcactggtttattcggatattttgcaatcaccgagctgaaatcagtaaacgtcgtgacttttttgccagcaactttcactaaccggtcatccattttaagcccggctttttgtgctggcgagtttggcatcactgtgccaacaatcgctttgttttgtgggacgccaccgtttaaaaaagcaaagagcgcaaacgccacaatcgcaaggataaagttgttgaacggtcctgcgaagttggtcaacatccgattgattaaactagccgactggaattgaacatccacgggtgcgatttgcacttccgttccgtctgattcaacaatcgttgcatcgtgactgaccgaataacgctttaattcggattcgtcaccactttcatagccttcaatccataattctttttgcaagtcagtttttgcaatttgaaatgggacaccgtttaacgtggttactttgtcacttgtattaattttttgaacagtttcttgttcgtctaacagcaaggttgcttgcgtgccggcttcgatttcagattcatcatccgccatccccgccatgcggacatagccgccaagtggtaaccaacgaatcgtataagtcgtgccatttttgcgcgttgcaaataatttgggtcccatgccaattgaaaattcacgcaccaaaataccagaacgtttcgccatgtaaaagtggccaaattcatgcaccactactaaaatgccaaatatgataataaacgcaataatcgccgccaatagagtacgactcccttctaaatgcgtatttcaatactctcatttgatatgaactgttatattatatcacgaattccttagaaacaagaaaagcgtttagcgcaaaccaaaaagttgcgctaaacgctagataatattgacttttaaaaacgtgctttttggttgcaacaacttccgcttaatctaaaatttcaaataatcctaaaaccgggattattcgaatttttgtattaatgctcagttgctaaccgccacaaacgcactctaaatcatgccaaacaagtgtagtagcggtaagacaaacaacatgctgtcaaagcgatctaagatgccgccgtgacctggtaagattttacctgagtctttaacgccataatagcgtttgtaagctgattcgactaaatcgcctaattgaccggcaattgagaagatcaacgttaaacctaacatgacaggcattgaataagcttgtgggaagaagtttaaataaatagctgcgaccactaatgctgataatgtcccgccaattgaaccttcccaagttttattggggctgatagctggccacattttattcttaccaaacatccgtccgaatgtgtaggcaccgatatctgtcatccagatgaccaataagatatacatcacagtgtcaaaaccaccaatatttcgcgttgcggctaaataatggaagcctaagccgatatagagactggctaaggttgtgacacccatatcatcgaagttaacccggtttttcgtgaagactgtgatggctaataaaatggcaacgaagaagtagaataaatcaaattgtgacacacctgctggtaaccagttaaaggcgcctttgggtgaggctaaacttaacaccgctagtccggcgatggttgcatcaggtgagacaataattcgtttacgcatgatgaaaacttctgataaggcaacgagtgctaaaacggctgccgcgatatcaatgtaaataccaccaaagaaaatgatggggataaagatgattaaagcaattgttgctgtaatgacacgttgtttcataattgtatttcctcctatttaagaccgccaaaacgacgattacgtttttggtaagcgccgattgagcgttcaaacactgctggggtaaagtctggccagaattcatctacgaaaacaagttcgctgtaagcaatttgccagagtaagaagttcgaaattcgctcttcgccactcgtccgaatcaataattctgggtcagcatattcccctagaaagccagtcatcaagtaatcactaatcaacgcatcgtcgattgcatcgacctcaattgtaccatttaccgcatctttagcaatctgcttaaccgcttgttggatttcgtcacgcgacccataattgagtgcaaagttcaaaatcatccctgtgttatcagccgtatcggccatcgcattgttagccgctttttgcgtcttttctggtaattcttgaatattacccatgactttcacacggacgttttcagcaatcaattccggcatgaacgtatcaaaaaaatcgaccggtaactgcatcaagaagttcacttcgtcatttggacgcttccagttttcagttgaaaaagcgtacaacgttaagactttaacacccattcgactggccgttttggtaatcgtcttaacgttttccattcctgctttatgcccagcgattcttggcattaagcgtttcttcgcccaccgaccgttaccatccatgatgatggcaacgtggttggggatattggtgggatctagttgttgtgcgtctgtttttttatttgtaaacaccacatactcctccagtttcaataactctcatatgattgtaccaaaaatcacaggaagtgactatttaaaatcaaccgattgtcaccggcattgtacaaactgaaccgcccattctgcactttttgagttcttcccagatgatttttatccacgattaagcctttaataccaacgattcccgccacaacgtactgttgccgctatcacattgaaatttattgttaaatattagtagattcctatagctattggcatgtaacaggttaaatatgataaactaatacataccttaaacagaaaaagggagtttattatgcgaaaaaccttcgaactctttcgacttgattggcgtcgaatcttaaaaagcccgatcgctcttctattaattattgccctcattatcattccatcgctctacgcgtggtttaatatctgggcgttatgggacccttatagtaaaacgcaagacttaaaagtcgctgtttactcagccgatcaaagtgttgtcattgctgacaaaaaagtcgagattggcgccgaactaattagccaattaaagaaaaacgacaaattaggctggcaatttacttcgagcaaaaaagaattagatgacggcgtaaaaacggggaaatactacgccgggatttacgtgcccaaaaacttctcaaaggatctcgttagtttcgtcgatggcaagattcaaaagccaaagatagtctactcatctaatgataagattaacgcgattgcgcctaaaattaccagtgcgggtgcaactacgcttcagtccaccatttcagaagaattcgtctcaaccgttggtaaaacattgatgagtaccctaaacaaggccgggattgatctcaatacaaatctccccgtcattaatcgtttctcgagcctcattctcaaaacagaccaacaaattccagaaattaaccaatacgcagaacaagtgcttaatctacaaaagaaactaccggaaatggaattaaagcttgcccaagccaacgagttcgcggcctttttaccacaagcaaatgccatggcgcaaaaagtagtcggcatcaatcaatacttaccacaagttgaagcagccggtcagctcgcaacgaaagttcaggctaagattccagaaatccaaagtgctggcaaacaagttgccacactcgattctgatttcgatggcatcgccaatactttaacgaacggcattaacgaagctcaaactggtttagatgtgttaaacaaaacacaaaaagtcttaccggacttaatgacttttagccaaacggcccaaggtgtcgcgggtcaattacaatcagacttaatccctaaactccaagctgctttaccggtcattcaaaaaacagtggatcaagggttagccattaccaatcaattggcaactaacatttcaactgatttaacggccgtcaatagtttgctgagtcaactcaaagaggatcccaataatgctgaactcaagcaaacgctcaaagaagcgctccagaacttatatgatcacaccgctaccttgcaaacccatgcgactcaacttgcgacaaccctccaaaacttgcaagacagctacaatcagtcagcagtggcgaatggtcaaccggaatcacatgcacttgatacaccgattaaacatttaaatacgttggcgacccaactcggcgtttttaaaggccaagttgatgaccttctcgcccattacgatgatttatcaattgacgatttgcaaaccaagattaatggtttgattcaatacgccgaccaagtcgaagacagcgtcgctaagattcaagcggcccatatcggtgacagcgtcaaaaatatgctcgaccgcttttcaacattaattgctagcggtaacgccgtcttaacacagcttaacggcgaagttttaccgaaactccccgcactcttattcaacacacaaaagacgctccaacaagccatcgactatctgcaaaaatatgctcagcagttaccagcgttgaaacaagaaattcatgacgcgaatacattattaaatggcaatctgggcacgattatctctggattaaacaccgcttctgacgtttaccagaatgattacccactactcaaaaataaactgcaactggcaaccagtttcatcaacaatgacttaccaggcatcgaaaacgacttaacaacgacgctcaacatggccaacgagaaattcccactcgttaaaaccgccttaaatgatgcgaccgacctcatcaacaatgattggccattcttacgtagcgggatccaaaaaggcgctgaggcgattcgcaaacaacaaaagacggtcgatctcaaagatctgattaaattgcttcgccgcgatgcaactaaggaaagtaatttcttagccaaaccggttgaactgaaagaaaaacacgtctacccgattaagacctatggctcagcaagtgcgccgttctacacagccctttgtctctgggttggtgcacttcttttgagtaacatcgtcttaaccaacttcgcgttagacgacaaacaaaagaatcagtacactaagaaacagcaatttattgctcgctggctaacctacatcgtcattggtgtcgcccaagccgtgattgtgacgcttggtaatattttcttattgaaggcctacatcgttgataaactaccgctaatcttattagccgtcttcctgagcatggtcttcatgacaattgtttacgttctcgccgcgatgttcgggaacgttggtaaaggaattgcgatgattgtcttggtgctttccatctctggcggtggcgggaacttcccagttgtcctctccgatcaattcttccagtttattaaccccattttaccgttcaaatacggggtcaacctcttacgcgaaccaactggtgggatttacgcaccgaacctctggcataactttatcatcctagcgctctttgcggttgttttcttcctaattggcctcttcctgaaagatcgaatcaatccattctttgaaaaactccacaaagaagcgacgaagagtaaaattattcattaacgcaaaaaaagccccgccactgttgtggcggggctttttgcatccattagggattaaccttctgtgatttctttttctttgttcttggcgatttcgtcaatcttcttcgttgcttcattcgtcaatttttgaacttgttcttctaaatcatgcatttcatcttcactaatctcgcttgctttttcagcttttttcaagctgtccattgcatcacgacgtgcatttctgatggcaactttgccgatctcagcttctttaccaacttctttagcaatttccttccgacgttcaccagttaattgtggaattactaaacggattactgagccatcgttggctggtgaaatccctaaatcagctgtataaagagctttttcgatatcttcaagcgcacccttgtcataaggggtaatcaacaagacccgtgcttctgggactgtaattgcggcgatttggttaagtggtgtcattgcaccgtaatactcaacattcacgcggttgaccaagcttgcattcgcgcgaccagcacgaatttggcctaatgttctttgtaatgaagcttctgctttttccatgcttgcttttgcttcatctaaaattggatttgccatattattctcctccttcgatcgttgtcccgatgttggcaccttcaacaacttttttgatattgtttggttcgtttaagttgaagactaccaatgggatatcattgtccattgataaagtacttgcagttgaatccatcacttgcaagcctttgttgataatatctaaatgtgttaatgtgtcgaatttaacggcacttgaatcagtgttaggatcagcagagtaaacaccatcaacgttgttcttagccatcaagatcacatctgcatcaatttcagcagctcgtaatgcagccgttgtatctgttgagaagtaagggttccctgtcccaccagcaaaaatcacaacgcggcctttttctaaatgacgaacagccttccgacggatataaggttctgcgatttgacgcatttcaattgatgtttgcacacgcgttgggacaccaatgctctctaagttatcttgtaaagctaaagcattcatgaccgttgccatcatgcccatataatcggcttgcgcacgttccatgcccatttgttcaccagtcacaccacgccagatgttcccaccgccacagacaatggcaatttgaacccctaaatcgtgaactgatttgatttcgtttgcgactactttaacaatttcagggttaattccgaaaccttggtcgccagcaagtgcttcaccactcacttttaagacgatgcgtttgtattttgtatttgacatgattgatatccctccgttgattactaggctcattttaccatatttaataagttatttgggtatgcgattctgaattatcgtaaaactgcaaaaaaaaggagcgcaaattgcgttccctttttgaagcaaaataagcttatttgatttggcccatgacttcatcaacaaagttattttcttttttctcgatcccttcaccaactgtgaaacgaacgaaacctttaacgctaccgttcttagatgcaacaaattgtgcaacagtttgatctgagtctttgatgaaagcttggtcgtttaagctgatttctgacaagaacttgttaacacgaccttcaacgatcttaggaatgatgttttctggtttgccttcgttctttgtttcttcagttaatacttcacgttcgtgatccaatgtttcagcaggaacatcttcgcgagaaacgtattgagggttaacagctgaaacgtgcattgcaacgttatgagctgcttcatcgtcagcaccttctaaagtaactaatgaagcgatttggccaccattgtgtaggtatgcgccaaagtggtcgccatcatttttttcaactaattcaaaacgacggaagctgatcttttcgccgataacagcagttaagttgattactgagctagcaattgtgccttcgcccattggtaatgcttctgcagcagccatgtcagctggtttgtttttagcgattgtttcagcaatatctttcaataaagctttgaattgatcgtttgaagcaacgaagtcagtttctgagttcacttcaacgattgcagcagtgttaccatcgatggcgatgcctgctaaaccttcagcagcaatgcggtcgctcttcttagcagcctttgccatccctttttcacgtaaagcatcgattgcttgagcaacgtcgccgttactttctacaagggcttttttagcgtccatgatcccaacgccagttttcttacgtaattccattacttgagcagctttaatttcagccataattcatacctccgacaatttatattcaatataattggtttaaaaaaagctgtcccacaagtcaggcagtatttgcgaaacctctaagacagcttatttgaatctactatttagcgtcagtgttagtatcgttgtcgccttcaactgcttcaacgatttcttccattgagtctgctgatttgttttctgcagcaaatgtagcttcttcaacatcatcttcaccttgacggccttcgatgatagcatcagccattttagctgtgattaaacgaacagcgcggatagcgtcatcgtttgatgggataataacatcaatatcatcaggatctgagttagtatcaaccatagcaacgactgggatatttaatttttgcgcttccttgatagcaatgcgttctttacgaggatcaacaacgaacattacgtctgggatgcgaggcatatcttcgataccgcctaagaatttttcaagtttttcttgttgtttcttcaacaaggcaacttctttcttaggtaaacgatcgaatgtaccatcttcgtccattgctttgatttctttaagacgtttgatccgtttttggattgtgtcccagttagtcaaagtcccacctaaccaacggtggtttacaaagtattggcctgcacgtactgattcttcagcaattgcatcttgtgcttgtttcttagtaccaacgaataagaatacaccttcgttagcagcttcttctttaacgaagtcataagcatcgtcaaccatgcgaactgtcttttgcaagtcgatgatgtagataccatttctttcagtaaagataaatttcttcatttttgggttccaacgacgtgtttggtgaccgaagtgaacacccgcttctaataattgtttcattgacaatacagccatgtcaacagacctccatatggtttttttcgaccactggtttcacttttttagagaacttgtcgccaagcacctctctagaaatcaaccagtgtgaattattttttggtattgaaataccgtttaaaagtatactaaaaataacaaggcgcgtcaacaagaacttacatgccgcccaattgtttctgataacgggttgcatcttgtggttggtggctcactgaggtaacgccactcactgtttcaaccgctcgatagcccgcttttagcgcgacttgctgactcgccacgttttcgtgtgcagcaatgatactcaactggtcaagttccaattcactggccgcgtattgttcaatggcggctagtgcgcgatgcatgacacctcgtccgcggaaagcttcatctaaccaatagccaacttcacccgcacgattcaagtcgtcaatattgtggacatcaatcgtaccaactaactggtggtcatcccaaatcgttgccatccaaagttcctggtttgccatttgttgttgcgcatattttaaaaagccaagttcatcggccactgattcgatatcgcccacccatggtaaccaagtatcgagattgacgcgattttgatccactaactgaaataacgccggcgcatccgcttccgtcacaggttgtaaatgaatgtgttgatcgacaactaacttaggttgcatattggtctctccattctaaaattgagttcttgaaatgccatgttccattaaatattgttcttttttgcggcggggttgatgtttgaacgcatactctgctttaagcgccgccgatttatcactaaacgtttcaaaatataataaccgcactggtcggcgcaattttgtgtacttcgcacctttgccagcattgtgcgtggcaacgcgtttggtaacgtcggtcgtgaaccccccataaaaactatgatcggcgcagactaatacgtaaaaataataagccttctcagtcattgtcagccatgaataacttcgtgcgcatctctggtgtatagtggctgtcttggtcataaatcgtcagttccggaagcattcgtaagcccccttttttaccatctttgaccgcttcaattaacaccatattcgcttctttgcctgctttgggataaacaaaccggacgcgtttgggttccatgcgtgcggcgcgtagttcgtcacagatttctaagaaccgttcgggacggtggactaaataccctttaccattcatctttaacaggccactcatggtttgaaccacagtgcgtaagtccgttgcaatctcatgccgcgccagtgccagatgttgattgggatttttttgactattgggttcaaccttaaaatatggtggattacaggtcacaatatcgacgctgtccttatgaatcttagtgttaacgtctttcaaatccatattgagcattgtcacctggtcggttaagtcatttaattcaattgaccgttgtgccatgtcggccaaccgttcttgaagttcaacaccgataatttgaccatttgttttgggactcatgaataatccaaccgccccattgcctgcgcacaaatcgacaatcgttccgcgttttggtaactgggcaaagtcggctaacaacaccgcatccatcgaataggaaaagacggatgggctttgaataatctgaatatctaagcgaaataattggtcaattcgctcatctgcttttaacatcgttctaccttcaacctcatttgtatttaggcatattataacaaagagtatcattatttggtataatgagcagatactagtcacgtttgaaaggaatctaaactatgtttttctcatttgcacgttttatcgtccgcattttagcctggttattgaatggcaatttgaaggtcgaaaataaagaagccctgcctgaagggacttatgttttagttggcccgcaccgaacttggtgggatccaatcttcttcgcacttgctgctagtccccgaaagttcacgttcatggctaaagaagaactctttaaaaacccaattctatgcttcatcttaacccacgcaaacgcatttcctgtgaaccgaacaaatcctggcccatcggcgattaaaacaccagtgaaagccctccgctcaaaagaactttcgttaatcatgttccccactggtagccgctattcaagcgaacttaaaggcggcgcggtcgtaattgccaagatggcgcgggtcccactcgtaccagcagtctaccaagggccattaaaattctctgatgttttaaaacggaaaaagattacgattcgttttggtgaaccaatcccaatcgatccgaaattaaaactcaacgaagagaacttagaagttgtcaatcatcaaatgcaagccgcatttgatcaaattgaccacgaaattaaccctgattttaaatatgaactacctgataaaaaataataacaaaaaactgctagatgatatcatctagcagtttttttaacgcgttaaattcttaactgtattcgtcaccaatagataggccgtaactaatgccactgcaatccagccaaattgtgttggaatcgcttggaaatcaacggcttgtctgagcggtgtcaataccagaatacctccaattaacaaactgattaaactccccaagtaaacacgccaatttgcgcgatccttgaacggtgatgctggtgtccgtaatacataaaccactagcatctgcgtcaataaaccaacgacgaaccaactcgcttggaaagccccctgttgagctgatgtttgcaggccaaatccaaaccagagaatcgcaaacgttaagatatcaaccattgagctcaacggtcctagaataaacgcactcttcagtaagcctttagttgcccactgtgttggttggcgcaattgatcttcagcaacccgatcccaaggtaaccagagttgtgcgacatcatacagtaaattctggacaagaatttgcagtgacaacattggtaaaaatggcaaacagatgctggcaaccagcacgctcaaaacatttcctagattagaagctaacgtaatccgaatgtacctatacatattgataaagactctccgtccttcaagcaccccgtgttctaaaacgttcaaatctttttccagtaggattacatcgctagcatcctttgtgaggtctgcggcattatcaactgaaatcccgacatctgcttgtttcaaagctgtcgtatcattaatgccatcgcccatgaaaccgacgacttccccttgtgcttgtaataaacggattaaacgcgctttttgaagtggagccaatctggcaaataatgcttgctcggttaatagctcactgacttgtgcatccgttaacgtctctaacatctcaccagtggtcacagctagattctgaatgcccactttttgggcaacttgctgcgtcgttaaagcactgtcacccgttaaaattttgaccgccacttgatgagcttgtagttgttgaattgccgagatagctgattgttttggtgggtccaaaaagcccaaaaagccggcgaaaatcagaccttgattaccaacgcggtcaattgatgccgtctctgctaactcatcttgataagcaaccgccagcatccgcatcccttgttgtgccaaacgatcatgcactgccactaggttctgcttttgcacttcagtcaacggctcaatctgatccgctaacctgacttgggaacacgttgctagcacttcttcaaaggccccttttggcactaattgattgcctgcatggtttttgagccagaccgttagccgccgccgctcgaaattaaatgaaatctcgcccaatttttaatatggaaagtcatcattggtttggtcttgttcatagtaatgaataatcgcctcatccagaaggttctgccagccggattgacccttggcgttcaaatatgctaatcgcaaaacttgcacatcccgctctcctaaaatatctgcatagtacatcaatttaatatgatcttccgtcaacgtccccgttttatccgtacataaaaccgacatcgccccgagattctgaatggcctttaactgctttacgatgacctgttgttgacttaaaacgacactgcctttcgccagattactattgacgatcatcggtaacatctccggtgtcaaaccaactgccactgcaatcgcaaagaaaaacgactgttgccaatctcccttagtcacaccattaatcacaaatacaaagggcaccaaaacgagcatcatgcgaattaataaccaactgatgtgttttaaccctgcatcaaattgattcggtcgcgacttaggttcagtagtcacaattgcgctaaagcaagtcgcttgacccgtggcaatcactaacgcggtagcttgcccattgacaacggtgctgcccatcagcaataaactcgccatatccgccgcattcgttacgtcagttgcttacgctgttatgcgtttgctcacgggttttgattcacccgtcaaagaagattgattaatttgtaaatcatggctcgccagaatttttaaatcaacattcaccaaatcccccgtctgcagctgcacaatatccccaggtaccagactttgtgcggcaacttcagttggttgaccctcaattacaacccggctggtctttgccaacatcgcttgtaaagcaatgctcgcttgctcggacttgcgctcttgcacgaatcgaatgctactagacacaacaatcatgattaacataactatcgcgccatcaatatctcgactgagccaggagatgatcattaagacggctaatacgccgataaacggatcttgcacgctctgccaactagctcgcaataacgaacgctgttgccgcttttgaatcgtattttccccataggtttgtaaccgtgctgttcgttgctgccgtgataaccccttcttgtcagtttcgaaatgttctaaactcgcttttggcgttaattgattaatctgattgagtgtcattttaattgtcttagccatcgtaatccctctcattcgcagctgatccgcataaaaaaggcatcctcaaagaaaggatgcctcacaagaaaaacaagccattccaatcgttgagctttagcactatatgacgtagaactttgttcagctacattagaaaaagccttcagggcagtttctgttgactcaattggcatctctcgatgtttctgagtagcagcgtttgttcatataggagcctcacctaacggattagcgatatcaatatatttatatatctatcacaccaaatcgacttcaaaatacaattaaacagacttattgaagatattcatttaaaaattgcgcaactttattacgataggttgttggatctgtagccaaggcttcaccatgagctgcccccgaaaccacccagagttgtttaggtgcatgcgccgctttgtaatttgtatacaccattttggttggtacaaatttatcttgatcgccatggatcatgaagattggcaatttcgagttagctaaactcttagcagtatcgccatcattaaagttatagccggcgcgaacccgtgccatccaattcgttgtgtaaaataacgggaatttcggcaatccaaagagatcgtttagttggtatgcgagttcgtcagcgatgctattatacccacaatcttcaatcaccgctttcacctgcttaggtaattcttcacccgcggtaaacatgacggtcgcgccacccatgctgaccccgaaaagggcaatttgactatcctgtccgttggtagcgacaatttgttgggcccacttgacgtaatccaagcgatccgtccaaccatagccaatggcatcgccttccgattcacctgctgcacggtcatccggcgcgagaacgttgtagccaagatcgtgatacatgtgaatatagcgtgccatatcctcttttttacccatatagccgtgcgcaactaaaattgttttgttcgtaggttttgttgctggcacataaattgccgccaattttaaatcatctgtggcagattgttgatgccactttgattgtttaacattttttaaccaacgttgattgtcttgatagactttcgttggcttaccaccatttaaaaatgatttttgccccggtacaaatgcgtattgatacatatacatagtggcaccaaatagtgctaccaccactaagacaacaacgctaattaacgaccatttcagccagcgtcttttcttcatgtgctaaattcctcccgatttactccgcaataataatagtcgtgtttttttgaaactgcttattcttcactgccaccattttggagttgatacatttcataataacgtcctttttgagccactaagctatcatgattaccccgttcgacaatctgcccttgatctaaaaccaagattaattcagcatcgcgaatcgtcgatagacggtgcgcgatggcaatacttgtacgtccttgacgtaaccgagcgagaccagtttgaatcatcgattccgtttccgtatcgatattagccgtcgcttcgtccaagaccaagattttaggatttgtaaccaatgttcgcgcaaacgaaattaattggcgttgtccacttgaaaattgggcgccaccttcaattacacgagcatgatattgaccagataattgttcgataaagtcatcagcttgcacgaattcagccgctgcgcgaatttgggcatctgtaatctcttgattaaataatcgaatatttgatgcgacatcaccataaaacatgaatgcatcttgtagaacaagccccatcttgcggcgcagttctgctgtctgaaaactccgaatatcatgtccgtcgattagaatctgaccttcataaaattcatagaaccgcatcatgacattaataattgaacttttcccagaaccggtatgcccaactaaggcgacagtttgtccaggttcaacaacaaatgagatgtcatgcaaaatttcatttttcccatcgtatgaaaacgaaacatgcttgaattcgacgcgaccctcagtaatttcatttgcagcatcggcattttgagctggcgcatattcttcttgatcgagaattctgaaaattcggcgaccagcgaccattccatcttgtaatgatgataaagaatccatcatattggtcatcggattaaagaagttcccaacataggttgtgaacgcataaaccaaacccgccgtgacaaagctatgcagggctgagacaccaaacaagctcaagacaacgaccaatgctagtgtatagagtaaattcacaattggtgcgagcaacaacgagttcgttcgaatcatcgcttcgcgcgtttttaaatagtccgcgttaacttgttcgaattcgtcggtcaaccgtttttcctggcggaattgttggataatcgtaatcccttcgattgattcgttgagtttcgtattcaactgactcaatttttcacgcatatgccggtaaacccgcgcactgtaactactgtaataccagataacaattaacaatattggtagaaacgctgccgttgcaagggcaatttttggtgaaattaaccacatcgcaatgaacgctgaaatgattgaaaatgaaccgactaacaaggataagaaaacattccaataatcaatcaaagtcatcgtatcattcgtgacccgcgatacaatcgagcctgctggcgtctgatcgaaataacgcatcccgagttgatggagcttctgaaataaatcgcgccggacatcttccatcgcgcgttccgaacccattccaaaaaggaaagattggaaaaattgtgtaatggctttgagaatcacgcctaaaccgtacaacgccgcaacccccattaaaacttgggtggtcgcactctgattggttaagtaacgatccataaagacttgtagtaatcgtggtaataaaatattgatggtcgctaaacctgcggcggccacaattgcgccgataaattggcgtttatagcgtttcgtataaccaaagaggcgtttcatgatgtgcaattgctctttcaatggaactttcttggaccattctgattgatattgcttggccatcttatgcacctcctaaggcttgacttaattgttgcttcaaccacatctctgcgtaccagccatctgcggcaaggagtgcttcgtgtgtcccacgttcggtgatttgaccgtcatccatgacaatgatttcatcggcgtgcatcacactactcaagcgattagcagtgataatggtggtttgatcagcccgcatcgttttcaaattcattaaaatcacttcttcagtctttgcatcaacggctgatagcgaatcatctaagatcagaatttctggatcagtcataatcgctcgcgcaatcgcaattcgttgtttttgcccaccagataacgacacaccgcgttcaccaacgaccgtttcataaccttggacaaacgttaaaatatcatcatgcaccgcactcgaaatcgcggcatcttcaaccgccgcttgatttcggtcaaaatcagcaaaccgaatattgtcgcggacatccgttgaaaataagaaattatcttgtggcacatagccgatactatcaagtaacgcatccagcgaataatcccggatatcgtgaccatcaatttgaatctcgccttgatactgatcatattcacgcaataataatttaatcagtgtggttttacccgaaccaacttttccgacaatgcccaacgttttaccttgtggcagagtgaacgccacctgtttgagcgttggttgtttttcgccagggtacgtaaatttttgaacagcataatgaatatcgccagttgctagtgtttgaatcgcatccggtgcttcgacaatggtgctggtttctttcaaaagttgatcaacccgatcataactcgcattgccccgttccaagacgttgaacaagcgcccaatcgcaaacattggccaaacaagcgccgcgatataactaatgaacgaaatcaattgaccaatcgaaatgctgtgattcataaccaacgtcccgccataaatgattgttacaatgtacgttaacccgataatcaaactgatggcgggatcaaataaaccatcaatcatattcacacgtttattaatcgcaattgtcttcgtgacaatctcgttgaaatctttaatatcagcttcttcttggccaaacgtttttaagactttaatcccagagacactctcttgggttttatcattcaaccgtgaaaaagccgcctgtgattgcccaaacgctgtgtgtaaatgtgcacctaaccgtcgtgacgcaacggccaacaagggcattggaatcaaggccatcaacgttaagcgccagtcaacgaaaatcaccatcgcaataatcgttgtcccaccagtgatgattgaatcggcaaaggttaaaataccggcaccagccacttgttgaatcgcggttaaatcattcgtggcatgtgccatcaagtcacctgtccgatgtttttggaagaaggtcgtgtccatcttcatgaaatgccagaacaatcgactccgcaatgtccgttccagtttagccgcgccaccccaaatccgggtccgccaaccatagcgaaaaatatattgtaaaatcgctgcgcttaacaagacgccgagccacatgattaatttttgggccgttaattgtttggcgtccattaaatcaaccagggtcccaatcacttttggtggcacaatttggacaatcgccacgaggactaaaaagatgacgccccataaatagcggcggtattcttgtttaaaataccaccctagttttttaaaaattcccatgttgtgctcctatcctctaaaattcgataagtcctattataacaatcttaattaagccggacaatcatttgtatttccgttcttattatgataaaaaaagagcttctaacaaacgacttgttcgttagaaacccttttaaaaccgacttgactgttttattttttgttgctacgtttttgttgtgctttcattgagctcatcatctgatttaatttcttttcagatggtttttgacccatttgcatcatcatagcctttaacatttcttcgttaattggtggattgtcttggaaatacttcttcatgtaagcacgtgcgccaaagaaaccagcgactgcgcctaataaagccccaatgacaaataataaaatgcctaatcccatatcttatgcaccccttcctaattcagttcacttaaatagtttacacataattaacctaaaaagaaagcggaattctaagattaatcgtcacgcaagcctttttcccgttggatatccttcactttttcaggagtgacttccttaccttctttgtcatacacttgtagcatctcaacttgtgagcggaaactttcgcggaaatcctttaaataggcatcgcgcagtgtttgacgttctgctgtttcagcttcagttagtccttcagcttttgctttgtgtgctaattcattaattcggtctaatcgtttttgatccattgccatcttgttgccctccaattcaaactatttgtctattttggactaaaatccgtaaaatgtcaaaaaacacgaacgcttgtttgaaatcccgctataggtatgctaacatatagctattagaacaaatgaggtgctcttatgacgagaacagaatccaagcaattagaggtcttgcgttttatccatgaccgcgttcaagataaaggttatccgccaacggttcgtgaaatttgcgaagccgttaatttatcctctacttctaccgttcatggccatttagcacgccttgagaaaaaaggctttttacaaaaagatccgactaaaccacgtgccattgaattaacagcagctggtttgacagcaattggtgcatcacagaagaagattccggttctcggtgttgttacagctggggtgcccattttagcggttgaagaagcgaccgattatttcccgattccaccaagtctacaaactgaacaagatttgttcatgttgacgattcgcggcgaaagtatgattagtgccggaattttagacggcgatgaagtgatcgttcgtaaacaagcgactgccgataacggtgacatcgtgattgcaatgactgctgaagatgaagcaacttgcaaacgattcttcaaggaacctgatcattatcggctacaaccagaaaacgatacatttgaacctattattttgaatgaagttagcatcttaggtaaggtcgttggcctataccgcgacagaatgtagctatcaaaaaaggattcgccgttatggcgaatccttttttagcatgttccttcagccaggtccttacgtttagcgactgactgacgttacattttttcttaacgtgctttctgatgcaatttcttccgtctagccacgtcccgcaaacaacccgattgcatcggttattcaccaacctaagttaatgctcagactctcccagcttagaaagacatccattaataatccattaatttgaagatatcgtagtctttaattttttcgcgaccgtttaaatcgtttagttcgattaaaaaggctgttccgacaacaatcccacctaattcttcaaccattttgatggttgcggcgattgtgccgcctgttgcgagtaaatcatctgtgaccaacactttttgaccgggtttgaccgcgtctttgtgcatgtataatgttgattcgccgtattccaagccgtaacttgctgagacggtttcgcgtggtaacttcccctttttacgggctggtgcaaaaccaacgcctaatttgtaagctactgggcagccgacgatgaatccgcgggcttcagggccaacgatcatttcgacccctttactctttgcgtattcgacgatcttgtcggttgctgctgcatatgcttcaccatcagacatcaaaggtgagatgtcacggaatgtgacaccttcttcagggaagttgggcacacttgcaacgtaatctttaaagttgattgccattttaaattcgctccttaactctttcaacagtttgctactgattgaatcctgccagccagtctttcatctccgcgaaggttgagtaaacaagctgcttttccatgtcaattttagctaatcgttgttgataacttggtgcactttctaatgcgtgcttttccggttgttccgcggccgaaatgagaccacattctattttaacaaatcctaagtcaaaaaacacctgcaacataaaaattaatagcggcaatttaatttttagataagtcgctaattcccctaaccgtgctttttcaattcctggatgttgacgtaggtaaaccaagaaagtcgcaaactgtttcttatcaggaataccatcaagatatgccgaatacttactatagaagataaagctgattttagtggcctgttgttggcgataaaaggcttcaaattcatctaaatcagttggttcatcaaccacaatcaattctgcttgctgtgcgacatcggctgctaagatggcttggctgtcggctgggatataactttgtagctgtgccagatgcttctcattgaaaaagacataggtgccactagctttaaacaactgttgcgtcaaccgattactccgttgatcgattaacacttgcccactcgtttgtaaatctttcagcatcaattgcaacgtcgtattgccgcgccaagtattctcacttagttgaccaactaatttcaactgttccaccgcttgtaaatcgtcgtacaacgcaccacggttaaatgctaagactgctaactgcgcttcttgatcaaccgccgtaaatttcaaatgcttctgatccgcaccgatctgcttcacattggtgacggatggcaccgtcatttcaatcaaaggttctgggttatccgtgccataaggagctaattgactgatggcttgataaacatcgggcgtcacatcagctaatgcgagttgtaaatcaaccgccaatgtgggtttcgttgttaaatcaatctgattatcagcggcataagtattcatcgccgtttgtaaagcagccaattgatcgactggcatcgttaagccaacagccatatgatgcccaccaaagtgcgtcaacaatgtgcgttgggcatcaagcgctttaaagagatgatatgcttcaacacttcgtcccgatcccttggcttggccagttgctagatcaattgctagcactaaagttggcttaccggtttgttcaacgatatgactcgccacaatccccagcacaccttcatgccagccttcatgtgccaacactaaggtcgcactagcttggttctcaggtgtttgtgccatttcgctagctagcgcagtaatttcttgcacaagaccctggcgctttttattttgttgttccacaaattgggcctgttccaccgcttgttcttcatcgaaagtcgttaatagattaacacctaagttggcatcacctaagcgaccaatcgcattcaaacgtggcccaatcccaaatccaatcgatgtggcgtcaagcgtttcttgttcaatacccgctgactggcaaagagccactaaaccgggacgactggtattttgtaattgttgtaagcctaagctaactaaaacgcgattttcatcagtcagtgacactaaatcacagaccgtcccaatcgccactaggtccaaactctcgtaagggatttcttccaataatgccgtagcgactttaaatgccaccccaaccccacataaatcactaaagggatactgtccctctggatgacgggggtgaatgattgctgtcgcatttggcaatgtacttggtagttcatggtgatctgtgaccactacatcgacaccgtgttcttgcgcgtaggcgattggctctaagccactcaccccgttatcaacggtcacaatcaactgggtcccattttcaacgagttgcttatagacatctaaattgggcccgtagccatctttaaaccggttgggcacatatacttccacatcggcgcctaaactttcgagcgtctcttgcatcaaagcggtacttgtaatcccatcggcatcgtaatcgccgtagactgtaattttttcgccgcccatcacagccgcttggattcgatcgactgccgtttgcatatcatacaaagcgtatggatcatgtaattgaccgacattcggatgcataaacgcactgattgcctcaggtgttttgattcctcgttgccacaacaattgggctgcggctttcgggagtgcttcaactgccattattgcttgtaagtcttggtcagttggtgttgcttttaattgccattcatattgtgcttccacattaatccctcgctacttccaaatcattaacttacccattatagcaaagattattatatttcgtttaataatccaatcaatgcttttgtttatcagtccaaatgatatactgttaattgatacacaaggttattacatagggggaaacaaccattatttggagagttgtccgagcggccgaaggagcatgattggaaatcatgtaaatgggtctaacctgtttcgagggttcgaatccctcactctccgttaaataataaatgacatggcccgttggtcaagtggttaagacaccgccctttcacggcggtatcatgggttcaaatcccgtacgggtcatttttttggaggtttagctcagttgggagagcgtctgccttacaagcagagggtcacaggttcgagccctgtaacctccattcggtcgcatggtctagctggttaggacgcctgcctgtcacgcaggagatcacgggttcgagtcccgttgtgaccgtcttaaaaaaagcgtaagcaataaattgcttacgcttttttgttgtttaatcattttaattaaagacgccagtgattaatagcaagtatccaaactcttgtaaatagcagttacgtttgattaggccgagttgtaacgcaattaataataactggccacctgcaaagagaattaaatgccaaccgtgaattaaatgcgttaaaatcactgcaataataatgcacgcccatactacataactgaggatagtaatcatccgattgtgagtcgttagttcgagaagataaatgatgattaagaataggcctaattttacgagtaaatcctcggggataaagtgaatgccactgaaaatctgagtaattaaaaagaaaaatggggctagtaagaattgaaatgataaccgtaacgtacggtctttgaactggtctgggtagataaaagggattagaacaaaaatgctagtaatccctgatagaagcccaatcaaaggtagatcacgccagccgatgattgcggctagaataattgcgactaaaagggcagcagttgcaattattcgctttggtttataccggggtgataagacgagtaaaatggctaatagcgcccctagaatcgcagttagataaaatgaaagcccgaattgctttggaaaagaccacattgtcagtccgacgattaaaccgagatttaaataattaaacaaagtcagtaattgtggccgagttgaagcctttagatgttgttggttaaggtagaacaatagcaacacttctttcttagaatatgtgtctcatcttaactttttttgaaaagaaggtcaacggcttttgaaatggattgtattttgtgctaggatagtagagttataagaagttcccgataggattcacacaccgtgaagaggccttgtaaccgacacatatatagggggaaacatagaaatgcaagaaagacatttatttacttcggaatccgtttctgaaggccatccagataagattgcggatcaaattagtgatgccatcttagatgcgatgttagcacaagatccacaagcacgagttgcttgtgaaacaaccgttacaactgggttagtcctagttgtcggcgaaatttcaacaacggcatacgttgatatccaaaaagtggtcagagagactattaaagggattggttatcgtgatgggcattatggctttgatggcgataactgtgctgtgattgttgcacttgatgaacaatcacctgatattgcacaaggggtcgacgattcagttgaatctcgtgcaaaggatgaagatccacttgataagattggtgcgggggatcaagggttaatgtttgggtttgctgtcgatcagacaccagaactaatgccgttaccaattgccctttcacaccgtttaatgcgcaaagtcgctgagttaagaaagagcgggcaactcgcttatctaagaccagatgctaaggcgcaagtcactgttgaatacgacgaaaacgaacaacctgttcgtgtcgataccgtcgttatcagtacccaacacgatgcagatgtgactttagaaaccattcaaaaggatatgcttgaacaagcgattcaaaccgttattccagccaaatacttggatgatcaaaccaagtatttcattaatccaactggtcggtttgtcatcggtggaccacaaggcgattcaggtttaactggtcgtaagatcattgttgatacttacggcggttatgcacgtcatggtggcggtgctttctcagggaaagatgctactaaggttgaccgttcagcaagttatgcagcccgttacattgctaaaaacattgtagcggctgggttagcgcgcaagtgtgaagtgcaattggcctatgcaattggtgtagcgcaacccgtttctgtttcaataaatactttcgaaacagggaccgtcagtgaagaaaagattcaaactgcaattcgtgaaaactttgatttacgaccagcagggattattcaaatgttagatctacaaagacctatatacaagcaaacagctgcatatgggcactttgggcgtacagatgtcgaatttccatgggaacgtttagataaagtggatgccttaaaggcaagtattgctaaactaaatgcctaatgtattattagacgagtaaaagaggcggcctttccttagcttatttgagttaagaaaaggctctttttatgcccaagaataagagagggagctaagaatggaacaaagtaagggaagaaaaacgaatgtattactcgtgacgattgcgattttcgtcgcaactttcatgacagccattgaagggacgattgtttcaacggcaatgccaaccatcattagtaatttacacggtatgaaattgatgaactgggtcttttcaatctacctattaacgaatgcgatgatgacgccaatctatggtaagatggcagatcggattgggcgtaaaccaatcttcatctttggtttggccttgtttgtcatcggatcatccttatgtggattgtcaaatcatatgtggacgttaattatttcccgggcaattcaaggcttgggagccggggcgattatgccggtatcatttacgattattgctgatatttatccgattgaaaaacgggcgaaagtcttgggttttaatgggtcagcatgggggattgcctccatcattgcgccgcttttagggggcttcattgttgataagttgacctggcattggattttcttcatcaatgtaccgattgggattattacgattggtttaatctggtacttccttcaagaagagaagaagacgagtgctgaaccagtcgactattggggcagtttatggttgatggcggcccttttgagtttactatatggcttccaagtcatgggtgaagccaaaccgtcagtgctcgttttagggtcaatgctcgtgattgcagtggttgctttttacctctttatccgcgttgaaaaacatgcacaagatccgattatctcattatcattatttaaaaatcgaacatttgttgtccaaaatgcagtggctgctttagtgagtggtttcttaattggttttgaagtctatatgccaatgtggatgcaagggatcctcggattgaaagcctcgatggggggctttgttgtgacgcccagttctgtgatgtggatttttgcctcattatgggcaggcctattacttgttaagcacgcatcacgaacaattctagccggtagtttgtgtattttacttgttgggagcttcatcttagcattggtcccacaaaccacaccgttttggttcttcttattagttgctgctggtttagggattggctttggcttaatcattaccacgacgactgttacggcacaaagcgttgctggtgctgacaaagttggtgttgcaacgtcgtttaatacgttaagtcgaactttaggtcaaaccttgatggtttcagtttatgggattattttgaatcggcaattggcaaaagggattgctggtgatggtcgattagatcaaaacatgttaaatgaattgattaatccagaaactgctttgaacttacctaaacaattattaccaacattacgccatattctatacaatggtttacacttcatttattttgcgtcaattgtgttaattgccattgcaattattattaatttaatggatcgtaaaagaagtaaataaaaaagattgaccaatacggtcaatcttttttattttaatggaataagacacagacgccttcaggtgtttctaagtctttttgacaggcggttaataaaccagtttgggcatcgcgccgataaagcgtaccattatcactattttggttaacggctaatagaaaatcgtcgttagcggaaagattgaagtcacgggggaattcaccatccgttgacatttgttggattgctcgtagttggcgactgtcatcactgatggcatacacaacgattgaattatacccacggttggaagcataaaggaaacgaccgtctttggaaacacggattgcagcgccgccgtttgtttcatgccaatctgcaggtaacattgagtaggtagcaaccgcgctaaaagtcccatcggctgcatgataatctaagaccgtcacttcactggacaattcacccaataggtaagctgtcttgtgattgggatggaagactaaatgccgtgtgccaaaaccaggttcactcttgtaaattgctactttggttaattgaccagcattgtcgacggcataagttactaattcatcggtgcccaaatcacagaccactaagcggtggtcaggtgttaggtcggtataatgtacgtgggcgctagcttgttcaggacgcggaccgtggccttcatgaactgtcgtgctcgctaaggttaaactgccatcggcttggatttgataaacgagtatttcgcctttatggtaattggctgcataaacgagttggcggtcttcatcgactgccacgtatgctggtggtgcgccggctgctaagaccgcgttcaaaaagacaggggtgccactagctaagtcataggcagcaatcccaccttggtccccatctttaatgacggtgtagaggatgttgcggtttgaaatcgttaaataggatgcgttatcgagattaatgaatggttggatgtcactcacggttgcagttgttgcatcgaaaattccgcggtagatccctttaccaatccggcgggtataaccaccaattaaaacttcttctgtcataatcagactcccttcgtcaaatactctttgagtatagcatattcctgcgaaaacgatttaatttgttactaaaaggattcactagtcgctaaaactaagtcgcgaatatgctacaatgatactatcttaactaagaggagatttcattatgaacacgcaagcagaagtcatttcaattggcaacgacgccattgatgatcaagaaccgatggtcattttattcgatgaacatgcgacaactgccattcaaaacgtggcattgattcaacattttatggacgaagcggccaaaaaacagctaacactgacgacagattctacggttattattaatcaacaaccttatacgattacgtatgtgggcgcgttggtaaatcctaacctcaacagtattggtcatgtcgctttagtttttggacctgcgccacaagaagatcaactgcaaagtgggctttatttaacaccagccgccgcgggtgttccggctgttcctgaattcaaagtaggaacgcagataacgtatcaagaaactatgtaggaattaggtgaattggtgtgacagagaataaacagccacaaacagaacgttcatggttctttaaatggtttttaaataagaagctaccgattgttttgttaaacatgttattaacgttgctgattatacttttattaacaaaacttgcttggctgttaaaaccaattcagtcgttgatgttgattatcgggttaccgattattattgcggccgtcttgtattacttgaccaacccgttaattgattggtttgaacggcgttggcatttaaatcgggtattgtcgattacgattatttttattttaattgttggcttactggtctggggaattgcgacgattattccaatcattcaatcccagacaacgagtttaattgatcagtggccgtcttattgggcgaatattcaaactcagacgatgaaatggtttaacgacccagccttcaaatcgattcaaaaacaattaaacgatatcaatacggatgtgtttagtaatttatcaagtaaagtaaataaaatgctgacttcgaccgttagtcatattggaacagcggtcggagtggtgacgaacgtagtcatcgcgattgtaacgatgccgttcattttattcttcatgttaaaagatggtcaccgaatgaaaggctatttgttaaaattcttcccggttaaagtacgcgccacaactgggaaagtgttggaagaaattaacacacaggtcagtcagtacatccgcggccaattgacagtagcgttttgggttgcagtcatgtttactgtaggctactggattgttgggatgaagtacgggttgacgttgggaattttagcggggattttaaacttaattccgtatttaggctctttcctagcgatggtcccgtcagtgattattgcagcgtttatctcgccgttattattgattaaagtactcatcgtgtttgctgttgaacagaccttggaaggtcgtttagtttccccattggtcttggggagcaagatggcaatgtatccggtcacgacaatcattgtgttgctggcttcaggaaagttattcggccttgccggtgtgattctcggtattccagtatatgcgattatcaagatattaattagtcacctttttgaatggttcaagtcagtttcaggcttatacgagcaataaaaaacgcacgatccgtaataaatgcggatcgtgcgttttttggtttttagagcgttaatttcatgtagtggtgggggatgcccgcttccatttcgccttcgcttgtgacaataaagcctaatttttcgtagaaaccaatggcgtggtcctgtgcgaataaaataatataaggcgttgtggtgcgtttagcgtcttcaatgatggcttcgattaattgatagccgagtccttggccacggaaagctttgatggtagcaacgcgctgaattctaaatccaccgtcttttaagacgtgcacgcgtgcggttactgctgggtcttgattgaggtaacctacatagtgaatcgtgtgatcttcgtgcgcatcgatttcctgtgtttccggcatattttgttctcggacaaacaccgttcttctaatgtatgttgcatcacgaaagataacactgttatctccaagtgtatgtttaatatccatttgtttcacacccttttctgatcaatgtagacgctaaggttaaaagcgacacgggtaattatacagttgtttcaagtcggattcaaccatttcagagaagtttttaggtacctaactaaaaagagccaaactaccgatttaaaaggtagtctggctcttttaactgctttttaaagcatgtcaccattaaaaattgaatggcgaacaagaacgtaatcgactttcttcaatgatgataagcgtttaccaccagcataagaaatcgatgattgtaagtcttggcgcatttcggtgagcgtgtcactaatcgcacctttataaggcactaaaatccgtttgccctcgacgttttggtgtgtgcctttttggaattctgaagctgacccgaaatattctttgaattgttgaccatcttcttcgactaatttgccaggtgattcagcgtgtcctgcaaagagggacccaatcattaccatgctagcgccaaaacggattgatttagcgatgtcaccgttggttcgaattcccccatcggcaataatcggcttggtagcagctttcgcgcaccatctgagggctgccagttgccaaccaccagtcccaaagccggtcttgattttggtgatgcaaactttaccagggccaatcccgactttggttgcgtctgcacctgcgcgttccaaatcgcgaacggcttcaggggtaccaacattgccggcaatgacgaaactcttaggcagtacttttttgatatgttgaatcatatcgatcacgacttgtgagtggccgtgggcgatatcgattgtaatgtattctggtagtaagttatcggttgcgagttgattaataaagtcgaattcatcgtctttaaccccgacactgattgaggcaaataagccgcgctcgtgcatcatcttgatgaatgcgggacgcttttcaggctgaaatcgatgcatgacgtagaagtaatggttttcggcaagccagatggcaagcggttcatcaataatcgtctgcatgttagcagggacgactgggattttaaacgtttctgagccaaagcggacgctagtatcaatctcgctccgacttttcacaatacatttattgggaatcagttgaacatcttcgtaatcaaatacgtccattgggaattctccttaaaaacgaacatttattttggataacacggaatttatccgtgcataacgtataataacgagcttttttatgaaagtcaaataaaaaacacattcgaacccaaagaatgggagaatgtgtttgatgatagtggccttttgtaagttaaacgggttctaatccgcaggagctggcacacgctctatttaatgtaccgcttgcgccagaagcgatagactagcacaccagaaatgatcagggaaatgaataaagtaatcaaccaacttgttttggagcgagacagtggaaggtccacgttcatcccgtaaaaactaaatactaatccggggatggtgagaataattgaataagatgccaagaacttcataacactattcatgttattattaataattgacgagtaagtatcggctgtttcgttaataattgtgttggaaatttctgccatttcgatggcttgttgattttcaatctgaatatcatcaagcaattcaatttcatcttcattaagatctaacatattggtccgcattaaactagcgagtaccattttatcggtctttaaggacatcatgaaataaactaagccgcgttgaatggtcatcagatcgaagagttcttcattctgtagggaactctgcaagcgagtttcgatttgttcacgagagcggttgatgtcccgcaaatattggagatagatggatgaaatgcggaagagaatctggaggacacttctacggtgattttgtggattgaaacctttaatttggccatcaacaaagctctgtaaaaaggtgactggcgttttgttgatggttaagacggtcgaatctgttacaataattcctaagggacttgttttatagaggtatttatctggtttttgcgggtctttttcaagaattggtatgttgaaaataatcagggtcgcattataatcaggatcgtgctcagcacgcgcactttcatcagcatctaaactatagtagataaaatcagatgggatgtggagcttcttagtgagaagctcaatttcttcagtcgagggatcagttacgttaatccaactgttggactggattttagcatgtttggtgagctttttcttagcactgtcgaagcgataggtttcgagcatggtgtcacttccttcatcaataacttactgttaagtctactggatattttaagaatgtaaagtgcggtataaaagaagtgcgttcaaaccgggtatcctttgaggattagcctaattagacgaataagcggcgtagccgattgtttggctaatgtagctaaccggaacgggatgcttttgaaagcacgttaaatcaaggagaatcagaaatttgaaaaaaattgagttagccaagcagtttttaacgacgaacttggccgtattacaatgtccaatctgtcaggacgtatttgcaagtgtagccgagcaccaattactttgtgtcaatgggcatagttttgaccttgctaaaaatggcacgttatattttttagcaaagcaaatgaagtctgaatataccaaggaaatgttgcaacatcgccgggcttttttacaagcagggttctttcagccgttcttaaaagaaattgcatcacggattacccccgatagtttagtccttgatgtcggttgtggtgaaggaacgccagtgcaacagctcaatgcgcaagtttccgcgcgttatatcgggtttgatatttctaaacctgcgattcaattggcaagtgattacaatgccgatgcgtggttttgtgcagcagacttagcgcggatgccatttgctgatcaccagttagatacggtgctcaatatcttttcgccttcgcaatatcaagaatttaaacgtgtcttgaaaccgggcggtcaactaattaaggtgattcccaatgcgggttacttacatgagttacgggagttactgtatcatggtcaagctaaggaaagctatgatcatggtccggtcttagaattgtttgcgcaacattttccagattatcaagaaatgcaagttcaaaaaacaatgacgttaacacccgagacattgcgcgatttggtcgaaatgacgccattgacgtggacggcttctaaggcacaattagcggcaatcacgttagaagcgctacctgaaatttcattagatgtcacgattttagtgggaaaatgatgagaatttaaagaaagtttaaaaatctgattgcaactctaaaataagggcgctataatgtttttaaggaattttttccctaacttttatcagaacttattttgataaaagctagtgatgaaatgacactaacgtagtttctcgccgtgaataaccgagggactacgtttttttatttgcaaagcaaggtagagcttttgtgaattctattgtataattaatctactgaatcttttttaaggaagtttagaccgtgactaatcatattgtattatacgaaccactgattcctgccaataccggtaatattgcgcggacatgtgcaggaacagatactgttttagatttaatcgaaccattaggctttgaaaccgatgataaacatttaaaacgggctggtcttgattactgggaccaagttaagattaattatcacaagaacttggatgcctttttagcaactgtgcccgatcgtcaatatttatacttgattacgaagtttgctaagcaagcttattctgatcaagatgtgtcggatacaagtgttgatcattattttatgtttggtaaggaaacgaccggattacctgaaactttcatgcgtgaaaatgaagatcggtgtttacgaatcccaatgtccgaccatattcgagcattaaacctctcgaactgtgcggcattagtgatctttgaggcattgcgccaacaagattttccaggactcgaaaagagtcatttgtacgacaatgataaattaaaatagggagtgtttttgatgcaaacgaagaaagatccaattactgttgatgcttttcattatgaccgtgtttcacctgatgtagaaccacaacaaaatatccaagtcagcttagtcaccatcagcgaagaagatccatatttacaagaagctgatttgagcgcggggaatatttaccaaattgtgacgcctttccaagttgcaccagaaaagagtggctttgcagtgtcaggtcaaatttcacaagtggttcaactcttagatttctttggtgaaccaaatgaaattgatcaaaaagacatgatgaagctttcacgaccattgattgaatacatcgaaacattgacgtatcaagtgacggcggttgctttaaatcggggcgttcaactccaatttacagcgcaagccaacgaagactaatcagcgaaaggttgcggcaattttgccgtggccttttttagtaccgtgattaaaaacggtacgggactgacatttatgggtttagtagtacagatgttcgtgtataatggatagtaggatttaaggttgaaggagattttcatggccactaaaagtaaaaaaagaaaaccagcagcacgcaaaaagaaaaaacaacaaactgatttcacagttaacatcatcgggtttatttttattttaattagtttatttgcgggtttaaagctgggctttatcggcgcgctttgcgctaacgtattccgtctgtttgttggcgatacgttcattattagtgctattttattcgcccttttgggggtctatttgttgatttatggcaagcagccccccttatggcaccaaaagacgcttggatttgcaatcgcgtatctcgggattttaatttggttgtcagcattcgtcttgcaccatcaagcggtcaataaccatttcttggccgccacatggcagcttttattggaagacttccagaagatggccgttacgacggaagttggcgggggcttaattggcgccgcgttgtatggtgttttccacttcttgttcgcgcagatggggacttatctgatagccgtcttgattgtgattatcggcgtttttgttttcttagatattccattcagcgtcgttgttcagagtacacaacggtttgtgcatgggctctttaaagctggcggctacacgaaatcagggttccaaaaggtctctgaaaaaggtaaagcgcaagtcagtgctttaaaagaacagacgcaaaaagctgttcaaaatgcaactgaacaagcagaagagacgtcagagactaaagagcaagtggtcgcaacggacggtccagaaaatgcaccgaagcaaaaattggaaccttttaaaataaacggtcccaaggatctaccaaaaccaattgcaacgcaagcagaaccaactgcacccgaaccggtggttgacgaagatgagcatgtcccagatgtggcagaactcgcaccactgaacgagacggatgatgattacgaattgccaacaccagcattattaacgcaaattccggcgtctgatcagagtgcggaatataaagccatcgagaagaatcaacaggtcttgaaacaaacatttgattcgtttggtgttgatgtgacggttaagagtgctagtctgggaccagccgtaacgaagtacgagattcaaccggcagttggggtgaaggtctctaaaattgttaacttagcggatgatttggcgcttgcattagcggcgaaggatattcggattgaagcaccaattccaggtaaaccgtatgtcgggattgaagtgccgaacacgaccgtttcgaccgtttcctttagagaaatgattgaacaagaacccccacatccaggcaaaccactcgctgtgccgttaggtaaagatatttcgggtaaggtcatcatgtcggatttagccaagatgccgcatttattaatcgccggttcaaccgggagtgggaagtccgttgcaattaacggtattatcacaagtattttaatgagtgccaaaccacacgaagttaaattgatgttaatcgatccgaagatggtcgaattaaacgtctataatggcgtgccccatctattgattcctgtcgtgacgaatgccaaaaaggctgcgaacgccttgaacaaggttgtaaaagaaatggaacgacgttatcaattatttgccgatacaggtcagcggaacatgattgaatataatcagtatattcaaggccacaacgaagacggcgaaattaaaggtgcaccactgccttatatcgttgtcatcgtggacgaattatctgatttgatgatggttgccagcaacgaagtcgaaagtgcgattattcgtttggcacaaatggctcgggcggcggggattcacatgattgtcgctacccaacgcccatctgtcgatgttattactgggttgattaaggccaatattccatcgcggatcgcgtttgctgtatccagtgggattgattcacggaccatcttagatggcagtggcgcggaaaaactgcttggccgtggtgatatgctttacatgccaatcgggatgagcaaaccattacgggtgcaaggcgccttcatttcgagtcaggatgtcgaaagtatcgtgtcgtttattaaagcacaacaaacggctgaatacgacgaagaaatgattccaaccactgagcaggaaaagcaatcaactgaagaaccagaagatgaatattaccaagaggcagtcgaattggtcgttaaacaacaaaccgctagcgtatcaatgctccaacgccgttttagagtcggctataaccgggctgcacgcttggttgatgagatggaaagccgtggtgtgattggaccatcagaaggtagtaagccacgcaaggtgttattacaaaacgtaccagaagaaccaacagaacaatagcgtgtgacataagtcaaatatcgcctaaaatggcgaataagcgcgtcagcgattgattgacattcaggattaactgaaaggcgctggctgatggaactcggttaaactattaaatgaaaaaggccgcgataaaaaatacttttgtcgcggccttttttgagttcaccttctttttttggtatgatagaatccgtgctatgaaaaaggataagttgaaaagagccattttaactgttgaaacagtgaggagtaatataacgtgaatcagaaaataacggatggcgtctacctgaatattttacaaactaaccaatttaaaacaattagattaaccgttcaattaattgcccccgtcacagctgatgggatgacccggcgttcattattagcgagcgttctaggtgctagtagccaagcctatcgtgaccaagtcgcaattgcgaacgaattacaagccatgtacggtgccggctttaatatgaatgcctatcgacaaggaaacttggcgatttttagcatctcaatgcgaattgtgagcccccaatatctacgggatacaatcgacttgcaagagcaagcgattgcgtttatcgggcaattattattgcatccagatgtggttgatggccagttcaatccggtcatttttaaccgtgaaaaagagaacttagtgcggtatatcgaaagtgttgcggatgataagcaatcatatgcggcggttgaattacgcaaactctattttaaagatgcaacgcaacaaattcccaattatggggatgcagctgatttagcaaccatcacaccggatgaactatatgcgtattatcaatcgatgattgcaaacgatcgggtccaaatgacgtttgtcggtaatatcgacgaagccaaaacggtcgcggatttggcacaattgccatttgcaccgcgtaatgttgaactgccaacgattttttatcaacaatcgttatatccacaagtgcaaactaaaacagaagtacaaacggtgcaacaaggcaagttaaacatggcctatcaaatgccagcttacttctatcaagctgattattatgccacaatggtgatgaacgccttattcggtggcacaccgctgtcgttactttttaccaatgtgcgtgaaaaagcgagtttagcctactatgcctcaagtgcaatcgatgcttttcggggtgtcattacggtacagactgggattgaaagtcgccaaaaagatcgcgtcttagagattatcgaagcccaacgtcaacggattatcgcgggtgactttgaacaggcggtctttgaacaaacgaagttggccttgattaatcaatttaaatcgagtctcgatagtgcggcctatttggggcaacaacaattcaatcgtttgtttgtacctgaaactgaaattgatgtagagcgatttacacaagccatcttggcggtttctaaacaagcggttcaagaacaagccgcaaagatgcaattgcaagccatttacttcctgaaaggggtcgatacagatgaagcttagacaaaatccccgcttaggtgaaaccctctatgaaactgaattagagaatggcttgaccgttaaaatataccctaagagcggttatcataagacatatgcaatcttaacgacgaattatggttcaatcgataagacgtttatcccagctggggaaacggattatgtgacagtgccagatgggattgcgcattttctggaacataaattatttgagaaaaaagattatgatgcgtttgaaaagtttggtcgctacggggcaagctcaaatgcgtttacgagttttacgcgaacgagttatttattttcaacaaccagtcacttgcgagaaaatttggatattctacttgattttgtgcaagaaccttatttttcaactgagacggtcgaaaaagaaaagggcatcattggccaagaaatccagatgtataatgatgaaccggattggcgcttattctatacagtgattggcaatctctatccgagtcatccagtgcggacggacattgctgggacggtggatagtattgcgcaaattacaccagaagcgctctatcaagcacatgcaacgttctatcagcctagtaatatgaacctctttatcgttgggcaaattgatgatccggatgaagtggttgattggttgaacgccaatcaagcggcaaaaacatttgcccaaccaacagaaattgtacgttcattgcctgaagaagctgaagatggtcatgatatcattccgtatcggtcacttgaaatgccaattacgcgtagcaagagcatggtcgggattaaaggtttaacggattacggaacaggtgagttagcacttgaaacaaagttgaagatgaacttgttacttgaattgctatttggtgattcatcaacgcaagtgcaaaagttgtacgatgatggcacacttgatgatagttttggttacgaatttgccattcaacggtcatttaattttgtgacccttggtggcgatgcggacaatgcccaagaattatcggatgcgattattaatatcttagaacatgccacggaaagtcctgacttttcagaggataacttggcgttggttaaaagagccgcaattggtgaatacttgcaagcgttcaattcgctagaagccattgcgaaccaatatagtgatgaattctttaccgaaatcagtccatttgatgtcttaggtttgatcgaacaagtgactttagcggacttgcaacagatggcaaccgattatttcaaaattgaaacgatgacagtctgccacatcttaccggagggagcaaaccatgcctaaatcagccttaattatcggtgcatccggtgatattgggatgacggttgcgactgaaatggcggcggacggttggtcgctttatttacactatcatcaaaatcagacgcgggttacgacgctgcaaaagcaattgttgcaagactacccaaaacaggatttttttgcgcttcaagctgatttaacccaagaggacgctgttggaaaattgacaggccagctttttcaagtcgatgcggtcatttatacagcaggtgcgacgacgtatggcttattgccagaggtcagtgcaacggtactcgatcacttatggcaggtgcacgttaaagcaccaatgctattgatgcagcagctgcaagcgaaactagcgcaaagtccattaggacgcgtcgttttaattggttcaatctatggtggccggggcagtgcaatggaagtgccatatagtacagttaaaggcgcacaatccgcctttgtgaacgcctatgcacaggaagtggcatcgcttggaatcacaattaatgtggttgcaccaggcgcagttgatacgaaaatgaacaatcagttcacaacagcagaacgggctgctgttgtagcggagatcccggccggtgcttttgcaacctcagcacagattgcctattgggtattgagtttaatggcacctgcagccgattatatgacgggacagacattgtacgttaatggtggttggttaaaataaagaaatcttaataatgcacatacgtaccaatatgctataattatggataatgatactgggataatagtgggtggaattgattatgaatgaaattggtcaaaaattacgtgaagcacgaattgaaaagggctacacactcgatgatttacaacaaatcacaaaaatccaaaaacgatatttaatcgccattgaagagggcaattttgatgccttgcctggcagtttttacgtgcgggcatttatcaagcaatacgcccaaacagtgggcttagataatgatgcattgttggcagaataccaagatgctgtaccagatacgaaaccagaagaatatgttgaaaaatccgttgaaaatcaaacccgattgacgcgcgaaacaacagattctaaatggtcgaaatggcgcaaccttgtcccacaaattacgattgtggcaattgtggtcatcattattggggtggtctatgggattgcgctcagcaaccgtggtaaagaccgcgaaacgttaaacgaaacaagctcatcggttacggtttctggggataaaccagatcctaagaaggatagcagtagtgaagacaagtctgctgaaagcagtaagaaagccgcttctgaaagtaaggcacaagaagctagcaagaaagctgctgaagataaggctaagaagcaagaattaacggcgaagatgaccagcattaatgggtcacaacaagcttttgaaattaagaacttgccagctaaagccaaccaaattacgttctcagctgataaatcagctgcttgggtcagcttaacggccaatggccaacaaatttggcaaggttctgtcgcagttggtgccgaacaaactgctgaattacctgaaggcgttacgcaatttagtattcaaactgggaatgcacctgcaacgaagatgaagattaatggcaccgatattaaccttagtccaaataacgaagcaacgtttgtgcggacgattaatttcacagcaacattggctaaataaaggacattaaggagtcttcaacatgaatttaccaaataaattaacgatgtttcggattattttgattccgatttttactttgattttagtattggatgtgcctgcgacagccattatggtcgctgggacaagtattccagtcagtgcgattattgcaacagtgattttcattgtagcctctttgacggacttactagacggcaagattgcccgatcacaacatttggtgaccaacttcggtaagtttgctgatccattggctgataaattattagtgatgacagcatttatcttcttagtggcgctagatcaagcgccagcatgggtggttgcgattattatttggcgtgaattagccgttactggcctacgtttattattaagcgaaggtggcgaagtgatggccgcagctatgccaggtaagattaagacgacgacgcagatgttagcgattattctattgctactcaacaacgtcttctttaacaatatcggcattccaatggcacagatcatgttatacgtttgcttgttctttacagtttattcgggtaccgattatttcatcaagaacagaggcgtctttaaagactcattttctaaataaacttaaactggcggggaatcccacgccagtttttttaacccaaaaagcacgaaaaaaacgcggtgattcgggtatagtagagtagcttaaaaaatatatagaacgtttgttcgatttttacttgcttttatttcgtgaaatcggtaaactaagagagtactgaaaaggactcttttgaggagggcacttaattggctaaagatgaaagacaagcagccttagatgctgcattaaagaaaattgaaaagaattttggtaagggctcaatcatgcgaatgggtgaaaaggttgatacacaagtctcaactgtttcatctggttcccttgcattggatgaagcgctcggtgtaggtgggtatccacgtggccgaatcgttgaaatttatggtcctgaaagttcaggtaaaacaaccgttgccttacatgctgttgccgaagtgcaaaagcaaggtgggactgctgcttatatcgatgctgaaaatgcaatggatcctaagtatgcaactgccctcggggttaatattgacgatttactcttgtcacaaccagatactggggaacaaggcttagaaatcgccgatgccttagtttcaagtggggctgttgatattttagttgtcgattcagtcgcagccttagtgcctcgtgctgaaatcgaaggcgaaatgggtgacgcgcatgttgggttacaagcccgcttgatgtcacaagccttacggaaattatcaggaacaatcaataaaacaaagacgattgcgttattcattaaccaaatccgtgaaaaagtcggcgtgatgttcgggaaccccgaagtcacacctggtggtcgcgcattgaaattctattcaaccgttcggcttgaagtccggcgtgctgaaaccatcaagaatgggaccgatatgatcgggaaccgtgcgcggattaaagtggttaagaataaggtggcaccaccatttaaagtggctgaagtcgacattatgtatggtcaagggatctcacaaacgggtgaactggtcgacatggcggtcgaaaaggacattattaataagagtgggtcatggtattcctatggggatgaacgcattggtcaaggacgtgagaacgcgaagaattacttggctgatcatccagaagttcaagatgaagtccggcttaaagttcgggaagcatatggtatttcggatgtcccagtagatgaaagcgatgaaacacaactcgacgtctttacggatgacgattcaaacgaataagaatcattaagctgaggcaaaagttattttgcttcagcttttttgattgcttaaccgaattattctgatggtcgatttgattgactgaactcgaaaacggttgcaatgccgatagtttaagttgacaggcggtttatgaaactataaaataactatgtgttgaaaaactaaacataataacatctttaaaaatttgcagtgaaagttgcaattcaaaatttttgatgatgcggaggtgaaacaatgaacttagcttttccattaatcctcgcagtcatcatgttaatcgttggtttactagttggttccgttctacaaaagaaggcgcacgaacgtgaaattgatggtgcaaataagactgccacaggaataatcgcagcagctgaaaaagaagccgcaacgcggaagaaagaaattcttttggaagcaagggatgaaaatcaccgctatcgttctgagattgaaaatgaattgaaagatcgacgcagtgaggtacaaaagcaagaaaaccgtttgattcaacgggaagaaacaatggatcgcaaagatgcaacgttggataaaaaagaacgttcattggagcaacgtgaaaatcgtttaacgaatcaagcacaagagctaactgaaaagcaggcagaagctgccactttagttgagcaacaaaaagcgaagttgcaagaaattgccgaattatcgcatgatgaagcgcaaaaaatcattttggatgaaacgaaacaagaccttgaacatgaacgggctgttttaatcaaagaaagtgaagaaacagctaaagaacaagctgatcggactgcgcgcacattagtcgctgaagctattcaacgcagtgcagcagatatggttgctgaaacaacagtaactgttgtgacgttaccaaatgatgatatgaagggccggattattggtcgtgaaggtcggaatatccggacattagaaacactgactgggattgacctgattatcgatgatacgccagaagcagttgtgcttagtgggtttgatccgattcgtcgcgaaattgcgcgcatgacattagagaagttaattcaagatggccggattcatccagctcggattgaagaaatggttgataagtcacgcaaggaaatggacgaacaaatcagacaaatcggtgaacaagcaatctttgatgttggtgtgcacacaatgcatcctgatttaatcaagattcttggtcgattacatttcagaacaagttacgggcaaaacgtcttgaatcattcaattgaagtggccaagttaacggggattttagccgctgaattgggtgaagatgtgacactcgctaaacgagctggcttgttacacgatatcggtaaggccctcgaccatgaagtcgatggctcccacgttgaaattggggttgaactagcaacgcgttataaggaaccggcaacggtgattaacgcaattggttcacaccatggtgatactgaagcaacatcgattatctcagtcttagtcgcagctgctgacgcgatttcagcggctcggccgggtgcacgttctgaatcacttgaaaactacattcaccgtcttgaaaaacttgaaagtattacgaatagttttaaaggtgttgatcatagttttgcgattcaagcgggtcgtgaagttcgggtgattgttaaaccagaacaagtcacagatgaccaagcaaccgtcttagcacgtgatgtgaagaatcaaattgagaaccaactcgagtatcctggccacattaaggtgactgtgattcgcgaaacaagaacggtcgaatacgcgaagtaatgcggattggcctaacattgaagcgggggacaaaaccaattttgttccccgctctttttttggttttaattaaaattgtggaggacattatcatgaaagaaggtgtgttattagttaatttggggaccccagataaaccagaagtcaaagaaattcgccattttttaaaacatttcttagctgatcagcgggtcgttgcgatgcccaaagcggtttggctccccattaaaagtgtacatgcaacagcaagttgctcaattacaagctgaattacccgattatcaagtttttgaggcgatgtcatatagtcaaccattcttaaccgatgtgcttagtgagattcaaacggcgggaatcgatgatttgacggtcgtgccaatgtatccgcaatattcaacgactacgacgatgtcggcttatgatgtagttgcgcagttttatttaaaacaatcaaacatgccaactttgcattttgtgaaggacttttatcaacgctcaggctatatcgacttgatggcaacggcgattgaacagaagctacagacgcaaacctatgacgaaattattttgtcataccatgggattccaaagtcgtacgtaacaaaaggggatccgtaccaagcacagtgtgaagcaactactgcgctattgcaggcgcgcttgcctaaacaaacttttcggaccacataccaatctaagtttggaccgaatgaatggctaacaccggccactagcactacgatgcagtcattagcccaagaaggcgttagaaaaattttggtcctaaccccgggctttgttgcggattgtttggaaactatcgaagagattgatgttgaaaatcgggactattttatggataatcaaggcgaacaatttgattacattcatccctttaatgctgatccacgatttacggccttattagcccagattgtgcgggacagataatcagggtgcttggcttttgcttaagaaatcaagtcattgttgtgtttaacgggtttgatttgtataataaagagaatgcaagagaaagtaggcaagttgaatgcaacccatgtttaaaattatagttggtctatttgcgacgatgctcgtatcggccgcaattaccccattagtgcgtcgcctcgcgtttgttttaggcgcagttgataaaccaaatgcccgccgagtgaataaaaaggcgatgccggcaatgggtggtctggccatttttatcgcgtttacgtttgggaccttcgtattattacgcgggcaattccaaacacacgaacttttcagtatcttcttagcagaatgtatcatcatcatcactgggatgatcgatgatattaaggaattgaatccaaaggaaaagatgctcggtattttattagcagcattggtcatttatttcttagcgggcgtccgcatgaatattttgacaattccatttttaggcacctttgaactaggatggttaagcttcccaatcaccattttttggattctggcaattaccaacgccgttaatctgattgatgggttggatggcttagcaactggcgtttcgattatcgcactcttcacaatgggcgtcatcgcctatttcttcttatcaatcaccaatgtcagcgtctcaatcatgattttttgtttggtcgctgcattaatcggtttcttaccacataacttccatccagcgaagattttcttgggggataccggggccttattcattggttttatgattgcggtcttatcgctcaaaggtttaaaaaacgtgacgttcattacgttattgattccagttattattctcggtgtaccaattacggatacaatttacgcaatgttgcgccgaattttgaataaaaagcccatttcacaagcagataaacatcatttacaccatcgtttgatgcaacttggtttatcacatcgccaaacggttctcgtgatttatggactggcattggtcttctcgttgatttcattgctctacccactatcgacactctggggaagcttggcattgacggtagccgtcttaattggcttagaattatttgttgaatcaattgggttacttggtgacaatcgccgcccattattgatgcttttaaaacgattattaaaaccgaagaatgaagaaaaggattagccaatggctaatccttttcttgcgttattggtagcgaatctggtgtaaatcctgtgcgctaatggggacttcgttgaattgttgagggccaaggtcgaattgtaattggccgttgaggcgttcggttaattgttgttgtaaatcactaactgctgtagtcgctaaccagacggtcatttgaatgttagtcgtatattggatgtcttcggcagtgaggtttaattggctaagtaaattttgcacagtgtcaaattgagcgtagtcaattgtaatctgacaagcggtttgttcgataccttggacaataccgaggtgttcaagtccggccgaagtggcgtgactgtatgctcgaataagaccaccagtaccaagtttgatgccaccaaaatagcgggtgacaacgacacacagattagtgagctgcatctggcgcagtacttctaacattggcacgccggctgtgccacttggctcgccatcgtcactttgtttttgaatattggccgttaaacctaattggtaggcgaaacaattatgattggccttcagatttgctttgcgaacttgtgcgatgaacgcttgtgctgcggtttcgtctgtgacacgcgcaacatgacagatgaagcgtgactttttgatttcgagttcaaattcgccgtctttttgaacggtaaaataactttgcataccggactccttgaaaaaataagctggatttaacggaactaagggtggaaggtgaaatgatggcaaaacaacttgcttatggtcgtcagtggagtgccacccaattgagtaccgttatgaataattatagtttaccacagattaaacagcgactagcgtttcaaatagttaatcagcgtctggtatgtcaacggtgtggacaagtggtgaaagagcaagctcgcttacctgatggtcggtattattgtgctgcttgcttgacctttgggcggttagtggaaggggatcagttggtttacgtgcctgaatgcaatctgtttgagtcgatcgtagaaccgctaacttggtcggggacactaaccccttttcaagcacaagccgcaaagcagattgttgcggtcattaccaagcaacaacgccatgtcttaactgcagtgaccggtgctggtaaaactgagatgttatttcaaggcattgcgacggctttagctaatgggcagcgtgtgtgtgttgctgcgccgcgggtggcggtttgtttagaactctatccgcgcttgcaagcagcgtttgctaacacaccaatcatgctgatgcatggggaacagactgcgccttaccggtatacgccgttagttgtttgtacaacccatcagttatttaagttttatcaggcatttgacactgtcattgtcgatgaggttgatgcgttcccatttgtcaataatccccagcttgagatggctgttaaacaggcgtgtaagccatgctgtgcattgatctatctgacggcgacaccaactgtaaagttgcgccatgcgattaatacaggggatttaacgggtagtgagctaccaattcgctttcatggtcacttattacctgaaccgcattgctatcccttgtttacgtggcggcgttcagttaaacggcatcagttaccatccgtgatgcgcaacttactcaggaagtgtcttcaagaacaacgcttattattatttgtgccacaggtaagggatttagaggcggttcagcagagcgttgttcgggcattgccacacattacagtgaacacggtacatgctggcgatcctaatcaattagacaagatagcggcctttagagcaggatgcggggacgtgctgattacgacgacagttctagaacgaggcgtaacgtttaaaaatattgcagtgtttgttcttggtgcagaacacgtggtcttcactgaatcagtgcttgtacagattgctggccgagccggacgacagcaagagcatgctgccaatccggtttattttttctacgcggattacacggtcgctattcagcgtgcgtgtcaacaaattaaacgacaaaatcgaaaaggacggcgattacaatccactgtttaatgtgtgcggcagttatccttgaacaaccctccattgcattgatttgttcattgcgaccagtctatccggcgatgatctgttcacgttgcatggcacagtttgaacggattgggccgcagtgttgttcgggatgtggtcggcaaatgacaacccagggggtgtgtccggattgccagagatggcagcaactgtatccaggcgaacaatttactaatcgagcgttgttaacatacaacgaaccaatgcaacagtattttcaacgctataaggggcagggggattatcgattacgtcacgtatttcaacggctgattcgagaaaattttcctgtgcaacggcaaacggcgtatatcccagtcccgactgatccaacacatttgcaaagccgcggattcaatccggtggttggcttatacgaggactgttttccactgaccccattgttgcagaagttaccaactgaaaaaggacaagcacaaaaaaatcgtgcagagcgcttagcaacgccgcaattttttaaatgcgcgcagaacgtgctgttgagttccaaggtgcagcagttaattttgttggatgatatttataccactgggcgcacgttatggcatgctcagcagtgtctccgcaagcgataccaaacgctgccaattcacgcaattactttagtccactaggaccatattatttgtgtgttacgcgcaaattatatataatgaagtcagtaacaaagcctcgggaaagaattgagttccgagcgacaagtgcccacagggggtatttgtgaaaggggagaattcatatgctaagttttaatgttcgtggtgaaaatattgaggtaactgacgcaattcggagttatgttgaaaagaaaatcagcaaactcgaaaaatatttcgatgattcagcgaccgcaactgcacacgttaatttaaaagtgtactccgataaaaccgctaaggtggaagtcaccattccattaccataccttgtattaagagcagaagaaacatcgcctgatatgtatggtagcgtcgacctagttactgataaattagaaagacaaattcgtaaatttaaaacaaagattaaccgtaaatcacgtgaacgcgggattaaaggtatggaattaacggtgccagaagcagaagcattaccagaagaatcaatgcaagtcgttcgaacaaaacgcgtttcattgaaaccaatggatagtgaagaagcaatcttacaaatgaatatgctaggccatgagttcttcatcttcgaagattcagaaacaaacggtacaagcattgtttataaacgtcaagatggtcgttacggtttgattgaaactgatgaataagtgaacgttaagttagggttgggacaacgatgagttgcgctcagccctttttttgtagccatatagataatggggttaaatttttactgaattggctggattgtttactgtgacagggttttatttgattgtaataaatggtaaaatgaattgttagtaatcatattgactatataagaaatcgctatttaagaactcaaacgtatttctagaggagaattgacgcacatggcaaactttctaaaaacatgggtagaaagcgataaacgtgaagtagcgcgaatgggcaaaattgccgatcaagttcaaagctatgaagatgaatatagtaatttatctgatgaagcgttgcaagctaagaccccagaattcaaaacaagattagcaaatggtgaaacattagacgatattttaccagaagcttttgcggttgcgcgtgaaggtgctaaacgtgttttagggttattcccgttccgtgtacaaattattggtgggattacgctacacgaaggtaacatcgctgaaatgaaaactggtgaagggaaaaccttaacggctaccatgcctgtttatttaaatgcattggctggtaaaggcgttcacgttgttaccgtcaacgaatacctttcaagtcgtgatgcaacggaaatgggtgaattatataactggctcggtctttctgttgggttaaacttaaatgctaagacaccagaagaaaaacgcgacgcatacaactcagatatcacttattcaacgaatagtgaacttgggtttgattacttgcgcgataacatggtggtttacaaagaagaaatggttcaacgaccattgaactttgccattgtcgatgaagtggattcaattttaattgatgaagcgcggacaccattgattatttctggtcaagctgaaaagtcaacagcactttatatccgtgctgatcgttttgttaaaactttaaaagaagaaactgactataagattgattggccaacaaagaccatcagtctaacagaatcagggattgaaaaagctgaggctaacttcggcttggacaatttatatgacactgaaaatacagccttgacgcatcatttggacgaatcattacgggccaactatatcatgttaaaagacattgattatgtggttcaagaaggcgaagtcctaattgttgaccaatttacaggtcgtgtgatggatggtcgtcgttattcagatggattacatcaagcgattgaagccaaagaaggcgttgaaatccaagatgaaaccaaaacaatggcgaatatcacataccaaaattattttagaatgtacaacaagttatcagggatgactgggacggcgaagaccgaagaagaagaattccgcgaaatttacaacatggaagttatctcaattccaactaaccgcccaattgcccgaatcgataaaccagatgtgctttatccaactttggaaagtaaatttaaggcggttattgaagatatcaaggaacgttatactaagggccaaccagtattggttgggaccgttgcggttgaatcttcagaattactatcgcgattactagatgaaaataacgtgccacacgctgttttgaatgctaagaatcactttaaagaagctgaaattatcatgaatgctggtcaacgtggtgcggtcactatcgctactaatatggctggtcgtgggactgatattaaattaggacctggtgtgacggatttaggcggtttggctgttattgggactgaacgtcatgaatcacgccggattgataaccaacttcgaggccgtgctggtcgtcaaggggatcctggtgtcacacaattctacatgtcattggaagatgacttgatgaaacgtttcggttcagaacggattaaagccttcctagaccggatgaagatttcagatgacgatgcggtgatccaaagtaagatgattacgcgtcaagttgaagccgcacaaaaacgggttgaagggaataactacgatacacgtaaacaaacccttcaatacgatgatgtgatgcgtgaacaacgtgaagtcatctataaacaacggatgcaggtcatcatggcggaagataatttgaaagaagttatcatgccaatgatttcaagaaccgttaaacggattgtgcaattgcatacacaaggtgaaatggggagctgggaattagaagcaatccacgcatttgccacaacttcaatggtcagtgaagaagaattaccaattgaaaaattacaaggtaagactgctgaagaaatcgaatcattattgatgacctttgcagaaaagaattacgcaacaaaacaaaaacaattagcagatgcagatcaaatgctcgaattcgaaaaagtcgttatcctccgtgtggtagatgaacgctggaccgatcatatcgatgcaatggatcaattacgcaactcaatcggattacggggctacggtcaaatgaatccattggttgaatatcaagaagaaggttaccggatgtttgaagaaatgatcagcgacatcgattacgatacaacccggctcttcatgaaggcggaaatccgtcaaaatattcgacgctaacgcgtagaaaatggctgaggtagttaacttagccattttttaatgggaaaaaatagtggagggactaaaatatggaattaagtgaagcaaaacatcttttagaagcaattgaagctaaaataacgcaatttagggggtcactttgacttagatggcctgcaagaaagcatcgcgcaaaatgaagcgcaaatggcggatcccgatttctggtcggatcaaaaagcagcccaacagttaattgatcaaaataacgccataaaggaaaaatacgactcttttatgcaacttcaagcgcaatcagaagagctacaagtgacattagagctattacaagaagaacccgatgctgaactccagacgagttttgaagctgatttgacggctgttcaagctcagatgcaacaatatgaactcggacaattactatcgggcgactacgatagcaataacgcgattgttgaattgcatcctggtgctggtggtacggaatctcaggattggggttcaatgcttttgcggatgtacttacgctgggcagatgcacacggctttaccgttgaaacagaagattaccaggccggtgaagaagctgggattaagagtgtgaccttgatgattaaagggcacaacgcgtatggcatgttacgttctgaaaaaggggtccatcggcttgtacgaatttcaccgtttgattcagctgggcgccgccacacctcgttttgttcagtcgatgtgatgccggaattggatgattcgattgatatcgaagtcctcaccgaagacttacgaattgacgtcttccgttcaagcggggctggtgggcaacatatcaataaaacatcatcagccgtgcggttaacacatttaccaactgggattgttgtttcatcacaggcgcaacggtcgcaattgcaaaaccgcgaaactgcgatgaatatgttgaaggctaaattgtatcaaaaagaacaagaagaacaggcgaaaaaagcggctgctattaagggcgaacagcttgaaattggctggggctcacagattcgctcatacgtattccatccgtacacgatggttaaagaccaccggaccgactacgaaaccggaaacgggcaagcagtcatggatggtgatttggatccatttatgtatgcctatctgcaatggcagttgagtcagaagaatcccgactagctgcaaagaaattgaaatataaatgtaatcaaattgtgattatttgaataaatagcatgctataatataaaagattgcggttttcattgacaataaataatgataacgacaaaaaaaggagtgtccccaattgattcgaatgacaaatgtgtcaaaaaagtatccaaatggcgtgacagcaattaaggatctttcgctaacgattgaacccggcgaatttgcttatattgttggtcccagtggtgctggtaaatcaacattcattaagatgttgtaccatcaattaaaagcaacgagtggtgaaatcgaagtcgctggttttgatttaatcggtatgaaggatcacgatgtcccatacttacgccgtaagatgggtgttgttttccaagatttcaagttattaccacgtttaacggtgtttgaaaacgtggcatacgccatggaagtgatcgaggcagaacctcaagcaatcaaagatcgtgtattagaagtgctcgaactagttggtttgaaaggtgaaattcgtcgctttccaaatgaactttctggtggggaacaacaacgggtcgcggttgcacgtgcgattgtgaaccggccagatgtgttgattgccgatgaaccaacggggaatctagatcctgaaacgtcagatggtattatggatattttagaagcaattaatgaacgtgggacgattgtcttaatggcaacccataacaaacaaatggtgaacgaacggacccatcgtgtcttagcgattgaagacggtcgcttagttcgtgatgaaaaagaaggtgactacggctatgaagattagaacattgaagcgtcatctcaacgatagttttaagagtttaaaacgaaatggctggatgtcaatcgcagctgttagtgcagttaccgtaacgttgttattagtcgggattttctttgcgatgatcttcaactttaacaagatttcacaagatattgaaaatgatgtgcacgtgcgggttatgattgaacggggcacaacaagtaaacaaaaagatcagctacaaaagaaacttgaaaaaatggcgtctgttaaagaagtgacgtattcaagtcgtaaaaaggaattaaacaaggttgtcggcagttacggtcaatcatttaagatgtttaccggagacgataatccgttgtacgatgtttacacagtaagtacgacaaaaccaagtcaaacgattaaagtcgctaaacaagcgaaaaaattgaaatacgtttatgatgccacttatggtgggaacaacgctaagaagttgttcaaggtaatgagtagcgtccgtaaatggggcgttggttttactttattattgctctttgtggcagtgttcttgatttccaatacaattcggattacgattttatcgcgacgcgacgaaatcggaattatgcgtttagttggggcaactaactcgtatattcgctggccattcctttttgaaggggcttgggttggattacttggggtaattattcccattattgtaatcgacttaggttatggttgggtttaccgtcatatggcactcagcatggcttcagccggttattcaatgttgaaaccaggaattttcttattccaacttgatttaacaatggctgtgattgggattgtgattggggcattaggttctgtcatctcaatgcgtcgtttccttaaaatttaaactaaattagtgaaagagtgacgaacattaaattgttcgtcactctttttttttgaaccctaggcagttaagggggcaaaatgctatactgattgggataactgcgaaattcggcagctggaaatcgagcgtgtgtcgttggaaacacgcacggtatttaaatatagacgctgggggtttgttgaattgacgatgatcattgatattttgcgaccattactaacggcaccacttttatggttagcgattgtgtatgctggctggttagcgcatagacgaattagcttggaacggaagacctttagaattgcgattaatccacgatggatagaagtgggccattttgtgggccatgggctactcgcagggctagccttaagttgctgtaccttagtgttaggggcgatggttaatatgcaatggtggctggtctatcaactaatcgctattttgagtttgctagtggctgctagatggcaaaacgtatcggcaacctttttaatcagtgctttggtctacgctggtgcaacattcatatggccccaatatcagatggaaggtcaagcaagtcttttggctgaattattggtgattattgggttagtgaccgtcatcaatagtgttttacaacgttgggatgccgaggcaactgtgacaccgcgtgtgatgactagcaagcgagggcggttgacggccttctttatgagtcgacaaatttatattgcgccggtctttttcttagtgccaggggcaattgatatgccaagtttgggtttttggccggtcttaaatatcgggcatcaatcatatagcttggtaatcttgccattgttattgggatttagtttgaaagcagtcaaaggcttaatgaaatcagttgttactaaaaatgccaatagctatttgatctttggcttgttgttagttgggtttgggttaattgccgttgcatttccgaactggattattggcatgttaacagttgcgctagtactaagctgtgcattacaatggcggttgagtagacgcagtgcccatgaacggcagttgcactttacgaaaccctacgatggcgtctttatcttagggattttacgcgaaacgccggctgctaaaatggggttggtcgttggcgatacaattgttgaatgtaatggcgaggctgtctcaaataacgataatttttatcgggcgattcaaagtcagccaacgtattgccatttaaaggttcaagatttaaacggtgagttccggatggctgaaggcgcaatttttgctgatgcaccacatgagttaggcgttgtattattcccagagaattaagtaaataaagggtggcatgaatgaagacaattttagtggtagacgatgaaccagcaatcttgacattattacgctataacctggaacaagaacattttaaagtgatgacggcaactgacggtgcacaagcgctgacgatggctttacagcagtcgtttgattttattattttagatttaatgttgcctaagctagacggaattaccgttaccaagaagattcgggaggcaaagttaaaaacgccgattatgattctaacggctaaggatagcgaaaccgataaaattgtcggcctcgaagtgggggcagacgactatgtcactaaaccatttagtccacgcgaaattatcgcgcggattcgggcaattgaacggcggacggcacagcctgtagcagtcgttgaaacgcaccctagtgatattttacaagtaggggacttaatggtcgatgaaggcgaagttgtggctaaaaagggcactcagaagctccatttaacgcctaaggagttcgaactccttgtttactttatgcatcggattaacaaggttcaaagccgtgagaaactcttaaatgcggtgtggggctttgattatccagccgaaacgcgaatggttgatattcaagtcagtcatttacgggaaaaaatcgaaacagatccgcgtcatccagtttacttaaaaacggtgcgtggtttcggttatcaattggaggaccccgaccatgaccaaacatgatcaatttagattttatcagctagccactattttagtggctgtttacataggttttattgtgcttgtcaatttggtgattgcccaacaacaagacgcgatgttaaaggaacggggcgccgactatgcgctaatcatcaaacaaccacagtttgatcggcaaaagtggttacgccaaaacggcttacaagttttgacgccaaaatcgccgaataaaacaaagttgcaaaaagcagtgacggatattgtcaatcggaatcattctgccgccaattttagtacgcggcaaacagttaataagcaaccgtatttgttttacgcacaccaagcagatcggcccaactttgtcttagtagtgcctcagcaacagttctggcatacgtggccgaagattgctttatcggtcacgattgtctatttaatcggtagctggatttttctataccgtttctggcggcaacgccgtcatttctttgaccacttgaaaattttagtcgctaatattcatcatattcggcatgaagaagtgcccgaaccgattatttttcaaaaagatgcgtcattatatatcctcgcgcaagaaattaataaattaaatggtgatatgcggcatatgcggcagaagattgccatgcaacagggcagttttgaccgcctaattgaccatttaccggtcggcgtcatggtgattaacgaaaatcgtgaagtcgttttgcacaatgaagcaatggatcggttattggagacgacgattgttactgagaaacacccctatattgatgatatcaagacgtatgaattaacacggatgattgagcacacttttaggtaccgaaagagtcatcaccaagaaattcagttgattcaaaatcaagaacggtttgtggatgcgaatgttgtccaactcaatacggttaaatcgaaattccaagcattagtcattttatatgatttaaccgatgtccggcgcgttgagcagatgcagttggattttgtcagcaatgtgagtcatgaattgaagacgccggtgacggctattacaggctttgctgagacgttgttagctggtgcggcggaagatcctgccacgcaaaagcaattcttacaaatcatctatgacgaaagtacgcgattaactgcgctgattcaagatattttggcgctttcgcatctagatcgtaaggaccaatcgcaagagcaacttgtgaatgtacgtgaattggtgcaggctaatctcgaactgatgcaacaaaaggcacaacaaaagcagttacacgtctccgttgatattccaacggatttagcgattagaattcagaaaatgaagtttaatcaaatcttgaaaaacctaatcgctaacgccatcacgtataataaacaaaacggctcgttggtgattgccgtgcaacttgaaaaagatcaaattgttatccgcgttgtcgataccggtttgggcattccaagtgacctacaagaaagaatttttgaacgattctatcgggttgatcaagcgcgcgcgacccataagagcgggaccggccttggactagcaattgctagcgagattaccgccagtttagaggggcagttgaccgtaaagagtcaattaggtgtcggtagtgaattcattttgaagctaccaaacgcttgatttacacaaaatttacatttgataggcttagtttttacaaaccttttttataatggaacttacgaggtttaaatggaattcgtggaggattaacatgcgcaaacgtaatgttattggcttattagtcacattcagtttattactattggctggttgccagtctaaacaaaatggtcagtccgtaacggcggtcggctcatcagcccttcagccgctgattgaagcgttagctgaacaatacagtgctgatcacagcggtcagttcattaacgtccaggggggcggttctgggactggcttgagtcagattcaatctggcgctgtacagatggggaattctgatttatttgctgaagaaaaggctggcattaaagcggacaagctggtcgatcatcgcgtggctgttgtcggcattaccccagtcattaataagcaattagggattaaaaacttaacattgacgcaactcgcgaagatttttagtggcgaaattgataactggcaagacgttggtggaccagatcagccggttgttttagtaaaccgagcccaaggtagtgggacgcggacgacgtttgaacaatgggtgatgaagtcgcgcaagactaaacccgctcaagaacaagattcaacggggatggtgcgatcaattgtagcgaacacgccaggggccatcagttatcttgctttttcatacgtagatgattcgattgcaatggttaaattaaacggcattgcaccaaccgatgaaaacgtgatgactaatgcatggccaatctggtcatatgaacatgtttacaccaaggggcaaccaactgggttaacaaaacgtttcttggcgtatgtcttatcagatgaggttcaacataaacaagtcggcaagatgggctatattccagttgctaagatgacggttgaacggtcggttgatggcacaattacaaaggttaagtagggggccaattatggatccaattaaagcaagtttacttaagaaatcacgcgcagccaaaagtgaaacacggggcaaattaatcagtttattctgtattagtttaatcgtgttcatcgtgctcgccattttctacttcgtcgcttcaaaagggttagcgaccttctttaaagataaaatcaatctaggccgctttttaacgcagtctaattggaatccaagtttgaaagatagtcatggtcgaccagaagtgggcgccttaccaatgattatggggtcatttggagtgactttcttagcggctttattagcaacaccgtttgcaattggcgctgggatttttatgactgaaatctcacctaagcggggtgaaaaattattgcaaccagtgatggaattgctcgttgggattccatcagttgtttacgggtttatcggattatccgtgattgtaccagctgtccgtcatttgtttggtggcagtggctttgggattcttgccgggacttgtgttttgttcgtcatgattctaccaactgtgacatcgatgacagtcgatgcactcaagagtgtgccacggcattatcgcgaagcctcactcgctttaggtgcaacgcgttggcaaacaacatggaaagtcgttttaaaagcagccacaccagggattttaaccggggttgttttcgggatggcccgggcgtttggtgaagcattggccgtccaaatggtcatcgggaacgctgcgttattaccacataacttaattaccccagcctcaacgttaacgagtgtgttaacgatgggcattgggaatacggtcatgggttcattagccaataatgcactttggtcattggcgttactcttattattgatgtcactactatttaacttattagttcgtttaattggtcggaagggagcaatgggtcgctaatggatgcaaaaaaatgggataaagttgccaccggtgtgctaaccctcatcgctggtttgatcgtattattattagcaagtttgctcggctatatcttggtgcgcggattaccacacgtgacgtggcagtttttaacgaaacctgcgcaaacctttactaaaggtggcgggattggcgtccaactgtttaattcattctatctattaattttggcgatggtgatttcagtaccgttatcaattggtgccggcatctatctcgcagaatatgcgccgaagaactgggtgacgaatgttgttcggaccgcgattgaagtgttaagttccttaccatccgtcgtggtcgggttattcggtttcttggtctttgttatccagtttaagctaggcttttcaatcttagcgggtgctttagccttgaccgttttcaatttaccgttgttaacgcggaatgtggaagatgctttaaaatcaattcacttcacacaacgtgaagcaggtcttgcacttggtttatcgcgttatgaaacggttaagcatgtcgtgattccagaagcgttacccaacattattaccgggatgattttaggcgctggccgggtctttggtgaagcggctgccttgatttatacagctggacaaagtgccccatcacttgattttaccaactggaacccaatgtacatcgcgagtccgttgaatccattgcgacctgcggaaacattagcggtgcacatttggaagattaactcggaagggattatgccggatgcgactgcggtttctgctggcgcatctgccgtcttaatcatcgccgttttactatttaactggttagcacgggtcatcggcaagcgtgtctaccgtaaaatgacagcagcataggagaaaataatggcagattacgatttaacaaaaacgcacatcaaacatttagatgaaccaaaacatgaaattgccttatcaactgaagatttaaacgtctattacggcgacaaacgcgcgatgcacgatgcatcattgcaatttgaacgctatcgaattaccgcgttaatcggcgcttctggttcaggaaagtcaacctatcttcggagtttaaaccggatgaatgacaatattgctaatacacgtgtgaccggtaagattatgtaccggggcttgaacatcaatagcgatgacgttgatgtgtataagatgcgggaacatatcggcatggtgttccaacggcctaatccatttgccaaatcaatctatgacaacatcacttttgccttgaaacaacatggacaaaaagacaaaaagtatctggatgaagtggttgaaacgtcactaaaacaagctgctttgtgggatcaagtcaaagattcattaggaaagagcgcattggcactatctggtgggcaacaacaacggttatgtattgcccgggcaattgcgatgaaacccgatattttattattggacgaaccggcttcagctcttgatccaatttcaacgaacacggttgaagaaacattgattcgcttaaaagaagaatttacaatcatcattgtgacgcataacatgcaacaagcagcacgaatcagtgattacacggcctttttccattcagggcacgcacttgaattcgacgaaacacgtaaaatgtttacccggccgaagattaaagcggccgaagattatgtttctggtcactttggctaggacgcaaggaggtttgccccgtggcaaataagattattgaatcctcagatgtgcatctattctatggtaagaatgaggccttaaaagggattaatatggattttgttgaaaatgaaattacggcgctcatcgggccatctggttgtgggaaatcaacctacttgcgctgcttgaatcgaatgaatgatttaatcgactcggcgaaggtgaccggtaaattcttattgaatggccaagatatttatgcgcctgagatggataccgttaagttacggaaagaagttggcatggtgttccaacaaccgaacccatttccattttcaatctatgacaatgttgtttacggcttacgtttatccggtgttaaagatcatcgcgtcttagatgaagccgttgaaagtagtttgaaacaagcggccgtttgggacgacgtcaaagataagttacacgaaagtgctttatcactttctggtggtcaacaacagcgggtttgtatcgctcgggtgttagctgtgaaaccgaaagtgatcttaatggatgaaccgacttctgcgctagaccctatttcgagtgctaaaattgaaaatatgttgctagaattgcgccaacagtataccattataatggtgacgcataatatgcatcaggcttctcgtatttcggataagacagcattctttttacaaggtgaattgattgaatacgcaccaacgaagaagattttcttaaacccaaccgaaaaagaaacggaagattacatcagtggccgttttggctaagaaagaagggaaaccacaatgagacgactttttgaagatgagttaaatgatttacacgttcgcttctccgaaatggggatgatggtcaacgaagccatctataaatctgttaaagccttcattaatcacgataagcaactcgcacgcgaggtgattgctgacgatcataagattaatgaacgggaaacggatttggaacgtaagagttttgagttaatcgcacttcaacaaccggtctcaactgaccttcgcgtgattgtcacaatcatgaaggctagttcagatttagaacggatgggtgaccacgccgtttcaatcgcgaaatcaacgattcgggtcaagggtaatacccgtgtccctgatatcgaaaaagatattgcggatatggcagacaaagttaaacaaatggttgaagaggtattggacgcttacgtcaaagaagatcgtaagaaggccatcaaaattgccgatgaagatgttgcaatcaatgcttattcagacaatatttatgacgactgtatcaaagaaatgcaacgtgattcagaaaccgtcgttgggagcatggactacatgttagttgcaagctacctcgaacggattggcgattacgtgacaaacatctgtgaatggattgtctacctcagaaccggtaaggtagtggaattaaactccaatgcacaagaagatgaattctaaacaattcaattaaaaattttaaaaagcgatgacaaggtcgacttgctcgtcgcttttttagtgggagaatcataatgcaaaaacaaatatacttagctggcggttggtttacacctaaacaggcctcattagtggaacgcgcacacgcggctttaaaacaaaacccaacgattggttatattcatagtccacaggagcatcaatacaagggtgtgacagaagatcatgatccagaaggcatgttcgggggttacgaatgggccaaccaaacgtatcaaaacgacatcacagcaatggatttagcagacatggcagttgtgttatgggatatgcaagacgaagatacgggaacggcgtttgaagtcggctacttgaatgcctgtcataaaccaatcgtctttgtttgtgaagatgatttacaagtcaatcccatcaacctaatgttggctaaagggattacccaatgtctaaccagtgtggatgaattagcaacctttgatttccaatttgtcgccggcgaaccttacacaggacaaatcgtttaagcaaaaaagcgcaggacaaaaataattttgtcctgcgctttttttgttctcactcttgatacctaaataaaaatcaacctttggacctatgacaatcgactgtaaaatcggcataatagagtcatagtcaagtgaaacagtacaacgaatgatcaatggaggtcaaaacaatgaatgaacgtcaacgaattttagacttagtgaaccaaggtattttaacttcagaagaagcattagtcttattagaaaatttagccaaaaatgaccaagatgtaaaatcaaatccaactgaaacagcaacggagcaaactgaacaaccaaccgctgataaaagcgcaattgaagaaaagacacacgaattaaccgttaacctttccggcgttaaccggcagttgcaagatttgaagcaagcaatgcacgctgatcaagaacaagtcactgtccttgatacgatggaagatttagatagtttaagcagtgaaaaagcaaccgaacggcaaacactcaaggctggcttattacaaaagcaagctgaagtcgacgagttggaagccaaacgcgaagcactgacggatgaactcaaccaaatcgaaaaagaacgccgccaaatgaccaaaaatcaatggtcagaaaaattaggtttatcagatgactggaaagaaaatgccagtgaaacatttgatgaattgagcgataagttaggcgaagctagcacacactttggtaagttcgtgaagaatactgccaaaacagtcatggataatgtggattggaaagaagtaaactttaaggtgcctggtttggcaactgaaaagttcagccatgaattcgtttattctgacgtaacaccagaaatgattaacgtcaaagtggctaacggtagtgtacatttccaaatctgggatcgtccagaagtcaaagtcgcagcgcaagtgaagttatatggtaaaatggcagaagcaacaccattggctgcttttgaagcgcgcagtacaattgatgtgactgatgccgacttggtcttccaagtgccgaataaacggattcaagcggacttaacgttctacttaccagccaataactacttacaaacgaatgtgaagttattgaacggggatgttgaattagatggctttaccggccgggatatttacttgaagacgactaacggtgaattaacgttaatcagcaccaacgctgcaatggtggaagctgaaaacgtcaacggtggcattacctttgatcaaggccgttacgatgatttactcgcaacaaccgtcaacggtaacctattgattcaagcgcaagttttaaatgcgagtgtttcaacggtcaacggggatatcaagaacactttgacgacaactgatttacaacatctaaaagcaaaatctgtgaatggcacaatcaagacagctttaccacaaactttggcaatgactgttgatgcccgcacgcgttttgggatgattaaaaatcggcttgcaaacacccaaaccatcgaacaacggcaaagtacggggaatcaaatgttacaacttggccgtaacgacaatgaacaggcagctcgtttaacattaagcacgacaactggtaatattttattgaaagacaacgataactaaaaaattaaggaatggtgggttttaacaatggggaaaagactttataaatcaagagataacaaaatgatttctggtgtaatgggcgggattgctgagtattttaatattgatgcgacattagttcgaattctatatgttgtattctcaatgttttcagcagcgttccctgggattgtggtctacatcatcttagtgatggtgattccagaacggccacgtcagagtaaacatgattctgaaagtgaatggagtgagttttaatgccttttttaatgattttattagtcattatcgccattatggcggcagttggcgtgtttagtctcgtgattggctcgctactgttattattaaaatttgcgctaccactgattgtgattgggttaattgtcagcttcatctaccgggcaattgctggcccaagtagacgtccacggcatgcagactggtgccatgactaccaagactattcttatcaagaaacagcacatcaaggtagccgtcaacgcaaggaagcccgtgatgtcaaagtagacgatgatgactggagtgatttctaatgcggtattggacacgcgtaattgttgatactttgttattcattgcgatttctggcttattgcccaatttattctatgttgaaaacatttggatcgcgttagtcgccagcattgtgttatcgattttaaacatctttattaaaccattgttgaacttactctcatttccaattacgtttttaacattcggtttgtttagtgtcgtgattaacgggattatgttagaattgaccgctgttttcgtcggcgcccactttagctttacaagttttggagcagccgtgatcgtggctatcattttatcaattgccaatacgattattacaaatcaatttgtgagagagcgttattaaaaagttagcgggactgacgtcaatgaagtgaaccccaaatattggacgaaactttaagcagctttctggtcagattaaatctgacggttctttttttacataattggggcaaacaaacgcgctaagttctgtgaccaacgttcttgattgctttgctcttgtatccgttgtttcgtaaatggtaagcattcttttaaatcagccgtaaaagattgttcaagttcagttgcgagttgtgcatcatataaaaaagcggtcgtttcaaaattcaatctaaaactgcgaatatctaaattagccgtcccaaccgctgctagttgcccatcaactaacattacgcgtgatttaaatccggttgattcagagaagtaaatctgaccgcccgccttcacgatttgtctagcgtaatacaaactcgcatgatgaatcattttatgttttgcacgtttggccatcatgatcttcacagtcaccccagaattaatggctaacactaacgccgccaatacagaatcatccggaataaaatatggggtctgaatccacagccgttttttagcggcagcaatcatcttcaaaaagcctaacttaatctcatcgagttctcgatcaggtccacttgataccagttgcatgctagtctgcccgtgttcatctgagttaggaaaatattgcggactgtaatacaccttttcctgacgcgtagccgcattccagtccatgaaaaagcgagcttgaaacgataacacaccatcgccggtaatccgaatccgcatatctcgtgcaggaatattaacgtgatgattattctggttaaaatcgccaaggtaggcggtattgccatcaattactgccaattgccggtggttacgaaagttaaagcgtagattaacgaaccggaaccgagaactaaaaaacgggacaacttggccgccggctgcttccaatggcttaaagaactgccgggataaatgttgcgacccaaatgcatcatacatcacacgcacttttaccccccgcagtgccttgtaagccaatagattgaccagttgacgcccgtgttcgttgtcataaaaagcatagtattcaagatggatatgatcttgcgcccgattgacatccgttaacaactgttgatacgccgccttcaaatccgttaaaattgttacattgttttcctgggtcacaaccgcggtatttgatactaagaagaggttgattaagctctgcgtttctggcggtaacgtgtgttgcttctgcgcttggcgtaacgctgctttttgggaggtcaccaaggcatcaatgccgagccgttcttgtgtttttaaatcgaccatatgatcttccggtaatttttttccgaaaaatagatacaaaacaaagccgataattggtaagaaaatcaataccaagagccaggcccaggttgctgcaatatcacgttgttggcgaaatacggtgataacagccccgattgtatttgcaatccaaatcagtgctatcccccagataatgattgctgtcattcttcattcatcctattctttaaaccactttgcttttaatttggctagcgtaccatttgcttgtaagacccgataacgtcggttgataaattgacgtaattgttgatcttgcggacgcatcccaacagcaaactgttctgctgcaaaaggactgtcgatggcttgaaaatcgctgccgttgtggcgtgacttaatttcaaattgcgcgtagacttcatcaattaagagccccttaatccgatcggcctgtaagtcgataaacgcattgttataagtatcatataggattggtgcatggttggcaattctttgctgtaatcgtttaggataacgctctagttgttccatcccagatgagcccgtttgaacgcctaatggttggttggttaaatcagccatttgattaacagggtgtttcttgagcgacacaatcatttgccgattagtcagatacgggtcactaaacgcaacccgttttgcccgttgcgccgttttagaataaccactccaaattaaatcaatcgtttgattattcaattccgtttctttcatatcccaatcaatcgactgaaagtcaacccgaatgccactccccttaaaaatcgcccgtgccaaatcaacatcaaaaccggttaattgaccattcttctcacggtaagtcattggcacaaaactatcatcaatcccgacgactattttttggcgtttttgaatcgttgcccattgatcagcctgctgattgcgttgtgcgcaccctgctaaaccaatcatgctcatcaataaagccgctattaatgctgtttttttaagcttcatcattttgttgaaccccgtttggttgtaattcaaagatttgatcagcaatctggttggcaaattgaatatcatgggtgacaacaatttgtgtcattccctgctgtttcaaatctaaaatgagttgtgcgacacttgccactaacgatggatcaagtgcgctggttggttcgtcataacagagaatctccggttgcatcgccaatgcgcgggcaattgcgactcgttgacgttgaccgcctgatagttggaacggataagccgtcgcctgagcacttaaccctagttgctgtaataattttgcgccatctgctttagcctttttagcgggttgttttttgaccatgatgggtgccagcgtcacattctcaaggacagaaagatgtgggaataaccgaaaatcttggaagacaacgccaatgcgcgccccttgttcccgattactaggttcgtaaggtttaccatcaataataaaccgtccgctatcgggttgatcaagcccactcattaaccgtaataaagttgatttgccagcaccacttggaccgacaatcgctaaaatactccctgattcaactgataaatttaagtcgttcaaaatttgccgacctttgaaggattgattgatattttctaattgaaacatgttgccgcctccttagcgataataacgataatagcgttccaaacgccgtaatgcccatgtacaaatggctgttaacaataaataaataatcccgactagcaaaagtggtaagagattgacatcacgcgcacttgcgacattgccagcccgcagtaaatccccaatgccgataacatacactaacgatgaatctttaatcaagttgatcacttcgttaccgacagacggtaagacaattttaaccgtttggggcacgataattttagcgattgtttgtgggtaagttaagcctaagacctcagctgcttcgatctgaccattatcaacggcttgaaagccgccccggaaaatttcggcaaaatacgcagcataattcaaaataaaagcgattaaagcagcatcgaaccggttaaaaacaattccgaccacgggtaaaccataaaatacaaaaattagttgtaataataacggtgtcccacgcatcagccacacatataaatctaaaagataatgcagtggtttaaacttagctaataaccctaaacttaataataaaccaagtggaatcgcgccaataatcgttaggccaaaaacagccaacgtcatctgcgccccacttaataatgctggtaaaatcgataaactatagtcaatcatgacagactcctctcatttgtccaaaataaaaagccctctttgcgtttaaaacacaaagagggctaaatttcgcggtgccacctcaaatttttgtttgcctcacaacaaacaactcagttagttttagaccaataaaaaaagtcccctggatttctccaagaggacgaatttatcgcggtgccacctcagtttaataaactgctcacgcagcttaaacttatgtagtttctaaaactacagcgataacgggctaacggatcatctttattcgatgatcaaactcacggttgtgccattaatctcaagggccgacttccaccacgcatcagctctctgaacctcaagaattaatttggaccgttcaacgtttaatgtattgttattcattctattcaatattgcatcaaaagtcaatggttaatgtttattgcttaccgaaaagacgggcccagaaaccaaccttgtgttgtttcaaagtcatcaatggaactgtttcgcctagtaaacgacgggcaatattccgatagccttggcttgctgggtttttcggatccatcacaattggttcgccggcattggacgtcttgataaccgcatcatcatcaaaaataatgcctaacaatgaaattgaaagatgtttggtaatttcatcaacatccatcgtttcgccttcattcatcatatgacgccgaatccggttaattactaagcgtggcgcaatccgcatttcttcttcttctagcaagccgacaacgcggtcagcatcactaacagaagaaatttcgggagttgcaaccacaattgcaccgtctgcaccggcaatcgcatttttaaagccagattcaatcccagcaggacaatcaagaatcacaaaatcgaattcttcttttaattcattcacgatggcggtgacttcatcaggcgttaacgcttctttatccgcattttgagcggctggcaataagtaaattttttcatcaaaacgtttatctttaatcagtgcttggtgcaacttagcacggccttgggcgacatccacgatatcataaataatgcggttgctcaatcctaagacaacatctaaattacgcagaccaatgtctaaatctaacaagcaaaccttcttatctaaaagcgcaagcgccgtcccaatattggcgcttgatgttgttttaccaacgccgcctttaccggatgtaataaccaaagctgttcccatttttattgctccttcattttacgatataattttggattaatctgtttcaaatccgttaactcaccgtagtcgataacatgtaaatcattgatgaaacttacactctgtgccgtaaatggcgtcttcttgtgatcgagaatctcaactgcgtctgctatccgcaattgtaacgcgtgtgataaatcacctgcaacaactgcttctgcattatctggaaacccagcgtgcacaatcccggcaacttcaccaagtacgaagatactgcccgttgcttttaacgttgcgccttggtgtaaattaccgacgaataagacatcgccaacataattgacctcttggccgcttcgtaaaacattgggttcaacgtgaatactattttcccgccgatcaatctcagcctgttcaatcgtcatgacttccgattgaatgcttgtcccattaaattctggaaactgctcaaagacggtcgccagtgcttgcttttgcgcatcattcaacaagcgtctaccagtggtcagctccagttcaatctgatcgctccccaactgcggttgctctaagcgaatcttattcaataattccgctagtgcaactaatgcttgatcgaaatccgcacccgcatcaatgtttaattcaaaaccttctttgcgtcctcgtaacgtgactgcatccatagaaaaatcaaaccccttaccgttctgattttaattttagcaataaatattttaaaggcaaatacaaaaagacaaaataaaccaaatttaatgcaattgtcggtgctaaaacattactaataaattcgactggtgttactgttgcataaccaatcaagcgattcatgatgtaaatcgtactctcgagtaatgttaaacacaagacatcgattagcccaatgaaaaaggctgagtcaggtaaatattgttttaaataacgcactgtatagataatgagcggcactgcaaaagtgtacatcccgatcatccccgtataatacaaatcgtataaaagaccaatccctgctgcataccacgtaagttggcgttcctctggtaaaacaaaggccgttaccactaacacgagcataaatagccggctaatcaacgtatgatctggtgtatataaccattgttcacataaatgactgatggcgccatccaaataaaacgcaacgagtaagtagattggtaataaatagcgccgttgtaatcgcgtcacacccatgctactcaccttcaatcgttcgtttgatgacagtcacaacggttaaattgtttaaatcagcagctggggtcacataaacagttaatgctaacccaaaatcgtctttcttaactgctgctaccttaccaaggtacaagcctttaggggttaatccacctaaaccagacgtgattactttgtcacctttttcgattgccgcatcggtcttaatctgcccgagcttcaattgtttccggtcagcattgtaaccggacatgatcccattaacttgcttaccatctttggtattcaccacagcagcaaatccgttactactttgatccgtacttgaaacgagttcaaccttcgaattagtcttgttgacttcaacaatccgtccaataatcccagactcagacatgacgggcatatcttttttaagtccagctaaggcccctttattgataaccaatgcattttgccaattatcaggattccgggataaaacagacgcattaacggttgtataatccgtcaaggtgccttttaagccgagttcctttttcaaacttgcattttcttctttgagggtttgggtttgaaccttggtttgagctaaatcatcaagttgtgctttaagttctttgttttcctggtacgtattaatcaagtctgttaaggcatctacccctcgaccaatcccattggccggcacgctaatgacttggttagtgatgcccgttacgtcgttgccaaattggcgtacgaaactcggactctttttgttattgcgtaaaccaactgacattgcgatgaagcccatgcagacgattagcatgattaataacacaattaacttcttatttgaaaaaaacttttgcatggtttcttcgccaccatccatccttaatatcgtaaaggtgggacaaaaaccggtgatcagtagtccttcctatagcaatcgattcacaacccgaatctgtcactaatttaggcgctacgtcaacgctgaccgcttcttgtcccacttctactgaacgattaatttttcttcataacatcgatattctttaatgattcgccagttccgactgcaacacagtctaaaggatcttgagcgataaagactggcactttagtagcatctgaaatcacttctggtaagtgtttcaacaatgcgccgccaccagttaagacaatcccgtgatcaatcacgtcggctgcaatttctggtgatgtttcttcaagtgtttctttgatggcttcgataatggctgtgacaacttctttgatggcttcagcaatatcaacagcttgaatgtccactgtcttaggtagcccagttactaaatcgcgaccacgaatgctcatcgcttcaatttccttagcgcgttctggtgatgctgaagcgatttggaatttgatttgttcggctgttctttcaccaatcaacaagttattgttttgacggatgtaagaaatgatcgcgtcatctaacttgtcgccagccattcgaattgaacggcttgaaacaatcccacctaatgagattgtggcaacgtctgttgtcccgccaccgatatcaacgaccatgctaccagttggatccatcacaggaagaccggcaccaattgcagctgcaaatggttcttcaatgacgtatgcatcacgagcgcctgccaccttagttgcatcgattacagcacgtttttcaacttcagtcacaccacttggtacgcagaccattacaaatggcttgctagatgagcgacctaatgatttttcgataaaatatttaagcatggcagcagttgtatcgtaatctgcgatcacgccatctttcattgggcgaattgccacaatactaccaggtgtccggccgatcatgtcgcgggcttctgagccaacagcaatcacgtcaccagtttgtgtatttttagcgacaacagagggttctctcaagacaatgtctttaccgtccatgtatacgagtgtgtttgcggtacctaagtcaataccgatatttctagtccctaatccgaacactatttttctctccttcagttaccaaacgtttttatagtcattggcattatatcataattttacgtaataaaaaacgcaatgtaactactatgttaacggattttcagaaaatttgacaggtctcgcctaaaattaacagattcttaaagaaaaaagcgttctcttttactccactaagtaaccctcttctcgcaaactgagatactgctggcttccaataatcaagtggtctaggcatacaatgcccatcagttcaccacaggcgacaattcgtttagtgaaggcaatatcttgcgttgacggcgtcaactggccgcttggatgattatgcaccaaaataaattttgctgcagaataacggaccgctaatttaaagacttcccgcggatgcgcaactgaactatcgagtgtaccaatataaatctgtttcatctgaataatttgatttttaacgtctaaaaaaacagctagcagttgttcttgcgtttcgcccgctagtgtttcaatcatgcgacggccaaccatttggctcgatgcgaccacaccaaaccggagagttcgttgcgtttgcaatcggtgactcaattcacagatggcttggatttcaatcgctttgactggtccaattcctgccagtgtttccaactgcgttaaacttgcttgttctaaatcccgaaagtcaggataatgcgctagcaatttgcgcgccacctcaccaacagataggtgactattaccagaacgcaaaatgacgattgccaattgctcgttcgataaacttgctgcgccgtactgcattaattgttctcttggttgtaattgtcctgtattccccgccattgtttgcctcccacaaaaaaagacgcatgacgcgtcttcttggtttaactaacaatacgttaattaacgggcttatttttctaaatacggaatcacttgagccaaatccccaacggtcgcaagtgtttgctgattggttatcgcagttggtgcaattaaatcagggaccataatcaccggaatggcagctttactagcggccatcacaccattaggtgagtcttctaatactagggcactaggcgctggtaaggctaatctatccaacgcttttaaaaagatttcggggttcggtttgccgtgagtcacttcgtctcccgcaacaatttgactaaaccgtgattgtaggccagtactttgcataaagtcatcgaccatgctacggaaattgctcgatgcaatcacccgactaatcccctgattatcacagtaatctagtaaatcgactaaccctggcttaattgcaacaccatctgcttcaacaaccgttgctacgttacggtatgaacgatcaataaattctgttgcggccgttgccgaaccaagctttgctttaaaataattgcgtaaatacgtatcagtggtccctaagatggcatggtgatcttcaggtgtaaaatcaaagcccatttctttagcggcccgaatattggcttggtaataaatcttctccgaatcaaccaatagaccgtccatatcaaaaataattcctctagttgtcattgactattctcctttaaaatattggcgaatcgtactaattaaatatagcgaacccgttacgagtaatacatcatcagccgacacatccgctaataattcggttaatgcaaccggccagtccggttcaaatgtaatcgtctcatcaactgctgcatattgggccgctgttgccgcgcgtggattatcaggaaccgtagtcagcaccatccgcgtcgctatttttttgagctgtggtaacatctcatccagatttttatcaccaagcgctccgaataacaggtaaatgtcacgatttttaaattgatgccgcgttgtctgaaccaattgcgccaccccttccggattatgtgcaccatccaagataattaacggctcatcgttgattttttcgaagcgcccaggccagttaacccgttttaaagcacgtttgatgtctcgaacctctagtttttgttgcgtcaactgtaagtaacaccaaaatacttgtaatgcaaccgcggcgttttcaatttgataatcccccatcagcggaatctgtaattgtcgatacgttaccgcgtcattttggaaagttaactgttgcccccaagtaggtaacgttttgaccgcagcactcgaaaaatcacagccactaatggctaacgaactattcaaacgagttgccgtttcctcaaccaccgtcagtgcttcttttggtaattgaccaatcacgactggatgaccagccttaatgatcccggctttttgagtcgcaatttctgcaaatgtcttgcctaatagagcctgatgatcaagaccaatcgacgtaataactgatatcagcggcgtcaacacattagtcgagtcatacaaaccgccaattccgacttccacaacggcgacatcaacctgctgttgtttgaaatatagaaacatcattgctgtgatccattcaaactcggtcacttcaaattcggggtcagttgtttgaatctgggcaaccgttgtctgaatttgttgcgtaacagttactaaatcggcatcactgattggttcctgattgataacaattcgctcgttgaaccgcataataaacggcgatgtgtaacgaccgacttttaaacctaactcttcaatcaaacaactgaccattttgacaacggatcccttgccattagtgccagtcacatgaatgaattgttggttttcttgcggattaccgagacctgccaacaattgcgtcattcggttcaggttcgcttctttatgtaatctggggcgcgaatgaatatacgccaaagctgtttcgtaatctgtcactaacatcgccaatctcctttaacaaactgtctctattttagcatagattgcacgcgaatcgatgcttaaaaactggcgcacacaaaaagaccacctcagtttttaaggtggccttaacgtgcttttggttgcaacaacttccgcttaatctaaaaattccgttaatcctaaaacctgaattaacggaatttttgtattgatgctcagttgctacccgcaaccaatcacacttctttcactaacgtgctcctcgagcagccttttccggttaactgcaaaatgggcatcatggcaaaaaacgccacaatgcccattttactgttaatcctcaaagcctaaccagctcgagtcgcacttcttttttaacgtgttttcatcaacagcttcctgtgctttgctacacttatcaaatcggcgcttacagcgccaattcgctaagttaggcaaatgctcagaagctaaccgttgatgatgcacttatgcattttttaattctgctactcgtttttcgactgattggtattgttgttcgtagtctgcttgtttgtcgcgttcttcttggaccactttttctggtgcgcggtctgtgaagcccttgtttgacaacttgcctttagcacgtttgatttcaccgtctaaacgtttcaattcgccttctaaacgggcgatttcttcgtctaagtcgagcaattcagccaatggcacataaacttctgcaccactgataatggctgtcttcgccaatgctggtgctgttaaaccttcagcaatttcaagtgacttaggatgtacgaagcgttcgatgaagtcttggttttgtttgaagatcgtcattaatggcgcatcttgaatgttgaccaagacatcaattggcttgcttagtggtgcattggcttcggaacggatattccggacacttctaattagatcgattaacgcattcatttgcgttgttgcttctggatcgtctaattcagcgtgcacttctggataagccgcattgacgattgaatcgccagtatgtggcatactttgccagatttcttccgtgacaaatggcatcactgggtgtaatagacgcaatgtttggtctaaaacataagccaagttataacgtttattagcaatggctgcttggtcgtctccgtaaaggacttccttcgccatttcaatataccagtcacagaaatcgttccagataaagttatacaatgtccggcccgcttcaccaaattcgaagctttcataaagccgtgtaacatctgccaccgtttggttcaattggcttaagatccatttgtccgttaaatcaaggttagcggcatctggcatcttcgttggcgctggtgtgtcttcaaggttcatgatgacgaaacgacttgcgttccaaatcttattgatgaagttccaggcagcatccatcttcgtgtaactgaaacgaacatcttggcctggtgttgagccactcgttaagaaccaacgcaatgcatcggcaccgtatttttcaatgacttccattgggtcaatcccattaccaagtgatttactcatcttacggccttgttcatcgcggattaaaccgtgaatgaggacgtgttcgaatgggcgttgttctgtaaattcgagactttggaaaatcatccgtgagacccagaagaagatgatatcgtagccagttaccaacgtattggttgggaagtagcgtttgaagtcaggcgcttcagtgtttggccaacccattgttgaaaatggccataaggcactactgaaccatgtgtctaggacatcagaatcttgagtccagttttcgatatcttttggtgcttcttcgccgacatacatttcaccagtttgtttatggtaccaagctgggatttggtgcccccaccataattgacgcgaaataacccaatcatgaacgttttccatccattgtgtgaaggtattttcgaatcgttctggcacaaagttcaccttttgatcggttgcttggttcttcaaagccatttcagcaagtggcttcatcttaacaaaccattgcgttgaaagccgggcttcaacttgtacaccggtccgttcagaatgaccaacactatgtgtcattgggtcgactttaatcaaataaccttgttccttcaagtcagcaacaatcgctttacgtgcttcaaaacgatccatgccgttatacttgccggcactttcattcatgctggcatcttcgttcatgacattgatccgtggtaagtcatgccgattaccgacttcaaaatcgttagggtcgtgtgctggtgtaatcttcaaagcaccagtaccgaaatccttatcgacatagtgatcagcgataatcggaatttcacgattcattaatggtaatgtgaccgtcttgccaacaaggtccgcataccgttcatcatctggatgtacagcgatagcagtatcaccaggtaatgtttcaggacgtgttgtggcaatttcgatgctcccagaaccatcggtcaatggatagttaacatgatagaaggccccttcatcatcttgatgcaacacttcgatatctgataaagccgtccgtgcttttggatcccaattgatgatgtattcgccacgatagattaagcccttgttgtataaggtaacaaagactttacgaacagcgtctgataagccatcgtctaatgtgaaccgttcacgtgaataatcaagtgataagcccatcttagcccattgtgcgtggatggttgcggcatattcatctttccagtcccagacttgttcgatgaatttttcacgacctaagtcataacgtgaaatcccttgttcagctaattttgcttccactttagcttgagttgcaatcccggcatgatccatccctggcaaccagagtacatcatacccttgcatccgtttttgccggattaacatatcttgtaaggtcgtatcccaggcatggcctaaatggagtttacccgtaacatttggcggtggaataacgattgaataaggtttggcatctggattggcatttggcttgaataaatcagcgtctaaccaatcttgataacgaccggcttcaacttgatttggatcatatttggttgacatttctttgtgatcagtcatcttgttcactcctttaaaatattgcgtttaatggcaaacaaaaaagcattcctcacaataggacgaatgctttttcgcggtaccacctaaattaggactagactagtccccaactcatgatttgttaacgaacgaaattgtccggttagccctacttaatttcaggttaacagctcacaagctaccgattaattggtcattggaagacgtctcagccatgcatcttctctctaaactagcccaatcttaatcgctcttgttcaacgcgttgttaatagtttagctgagtgaacgccaaaggtcaagcgtcaccggcgttcattctgaaaataaatcccgaatcttctccccaaaaaaatcctgagaacaacatactgttattctcaggatttttatagtttacaatagttcagcaatgatttcttcgtcttgatttaagaattgatcgccagctttgatttctgtcactttaattccagcaagtgagcgttcaatcaaggcatccacatcgatgcgttgttcgtagaaccgggtcttatctaagttaggccgggtcttcggtgctggtggtgcaaaaatggtacagcaatcttcgaatggcatgattgataattcgtacgtatcaatatccttcgcaatttcaatgatttcattcttatccattgtcgcaactggccgcacgattggcgttgttgtgacatcattgatagccatcatactttcaagtgtttgtgaggccacttgaccgacagattccccattaaaaatggctaaaccttggcgcttagcacggatttgatccgttaaacgcaacatcatccgccgttgaatggtcattaagtaaccttctggcacagaatgcttcacttcttcttgaatttccgtgaatgggacttcgataaacttaatcccaccaacgtatggcaccaatttcgccgttaattctttggccttattcaaggcattgtcgcttgtgtatggtgggctaaagaaatgcaccatttcaatgtcgacaccccgtttgagcgttaagtaacctgctactggtgaatcaatcccaccagataacatcaacattcctttaccggcagaaccgactggtaagccaccagccccttgaatcacttggttggttaagtaaatcgcatcttggcgaatttcaacccgcaaagtaatgtcaggttttttcatttgcacttctaattcaggtaattcatctgataagtaaccacctaattcgcggttcatatcattcgtatccaagaagaaattgtgatcagaacgacgtgtgttaactttgaaagacatcccaggtttgccgatttctttcatcatggcaagcgccatttctttaacagaatctaaatcacgatcaacttggatacttggtgagaagttttggatgccgaagacgtgacggagacgttcgataacgccttctgcatcgtcgccgtttaaaacgatatgcatccggtcacgtttagggtgaatccggagttgtttatactcgtgaagcgcctttgtgacgttcccgtttaaccgaccgataaaatcgttccggtttttaccctttgtcgaaagttcgccgtagcgaaccataatttcagtgtattgcatgcctatctccttttagatggtagtttacgaattaatttttttgaagcgttcgttaatttgatcgaatgctttgatgaatgcatccgcttcttctagcgtattgtattcatcgagggatacccgaatggcgcttgtcgcaattttttcattgacgtgcattgcctttaaggtactagattcagtccctttcttcgaagagcaagcacttgtcgttgaaatatagatttcgtgttcttcaaacgcatgaaccgttgtttcaccgcgaacacctttaattgcgaagcacaaaatatgcggcgcaaaatcaggcgtcagttgtgaaaacataaccgttttatccgattgactgatatggttaaagagtcgttctcgaatagctgcttggcggtgtactttttcagtctcatcggtcaataacaaacgtaaggctttggccattgccgcgatggctggcacattttcggttccagaacgtaaatcatgctcttggcccccaccggttaaaagcggcgctaaatgacgcccgcgtttcttatacaaaatcccagtcccccgtgggccgtggaatttatgccctgataaggtcacaaaatcaacgcgttcgttgaaaatcgcctcttgaatgcctttgccaatcccttgaacggcatcaacgtggaaatgaatattaggataatccttcaaaatatcagcaatggcttcaagtggctgacacgttccgatttcgttattaatggccatgatcgaaactaaaatggtatcaggccgcaatgctgcttttaagtcagccggatcaattcgaccaaactgatcaacgggtagataagtcacatcaaagcctaatttttccagttgctgcatggatttaatgatggctggatgttcaaccgatgtcgtaattaaatgtttcccaaacgcccgtttttcaattgccgtgccttttaagacccagttatcgccttctgttccaccgctggtaaagaagatttcatcgtggtctacgcctaataaatcagcgatttgttggcgtgattgttctaaaatatgaaaggctttttccccaatcacatgtaaactagaggggttgccgaagaactgttcactaaccgcttgataggtctgaagtgcgcctggcgcgattttagtggtggcactattgtcaaaataaatcatatcgatccttcttactaaaaattagtgttttaacgttgtacattatagcaaattggttattaaagacaaccaattaatctttaacaaaacaaatccgagacaaaatgcgtcttgtctcggactggtgagcatctaagtgactaattagttgcgtctgacttttggtcgtaataggccttttcaacttgtgtgtaagcacctggatcaaccttttcaagggccgttgccaataagtcgacagctttagcatagtcgtattcttcattaaaaatggtttggaccgtcacacaggcttcctggatggcgggaaaatctgcacgatatcggttggcatattgtaacaattgctccgtaatcaatgcactgtcaattaaggtatccgtcttggccttcaattcatctaaatcctcttgaacgagaattaattgcttcgcgatatcgtctaaattaatcttaatttgattcaaatcatgatcaagtttttgaatctcatcagaaacaacgaagaagaaatccaaatatttctgttgtaaaccaggtaaattaaccttttcaacagcgcgcttcaagttacgtagttcaagttcaaactggcgtaagttttcattagcgacgacttcgccttgatgcaaactagcaacctgatcatgaattgcttgttgtttttcttcgatgacagttagccgttcgtcaatcccggtcaaatcttcagcaatcgccgtgtaaaccgcttcgtggttggcaatcttcgcttggtgcccttcaactaacgcctgttcttcaccaatttgcttttgtaattgtttggcgcttgccaactcaccatgtgtgagtgcataactctgattgagatgatcgagttccaataatagctcatggttctgacgttcagcatgttgcacgaatgtcgcggtggttggcaattgcgtcgcgactgccttcttggcagtcatctcagcttctaattgatcatataattgatcaatgccacgtgcaatttcatcgttattggcttcaaccgactcaatggccaaatcacttaacaaggtagtgctcttatcaagttgatccattagttgttgttgtttgacttcaatctgccgatcatcaaattgataatgttcttttaacatttgatggtaggtatcattaatttcaaccagttgttcgggaaactcgttagctaattcgttatagcgctttggaatccgttccatctggtcttctaattgcgttgtttcagtaattaatttctgcaaaatggccttagcccctagatggtcgccggctgttgttagttcgttggcttcgtcaaaatccacctctaagcgacctaacgttgcttcaagcgcatctaatgcaggtccaaacgaaaaactcttagtcaacaaacgtttacgtagttgttgatattgttctcgtagacgctgaattttttgacgtgtatcggcttcattggcaagtagattttctaaagcatcttgaacatccagtaaatcttgatccgtttcagtcaagtacgcccgcaattgtttgagaatccgtgcaacctgaatgaattggtatttggcattggccgtttccgcatcaaaaagatagccttcaatcgtgctgaagttatggttggtaatctgctcatattgtttttcccaacgatcaaagttttgcaaactttcgcccgtcaaatgtaacgaccgtaacttcgttaagcgttccggaatcggcaacgccattaagtcgcctttatgtgcttctagttgtttaatttgtttgataaaataacgttgataaaaaacaacacttaggtagccaatcagtgcgacgactacgattccaatgagaatgtaaaacattcaaagacacacccttttacaatttaaatcagatttgttagtccgttcatccacttcaattcattaaactatgtttgattatagcatgaataagataacggttcagcaataattagcgataaactttagaaaagctgcaattttaatctgaatttgcttgacgttgccgcacaccgtacgctatactagccattgtgtaaaataatgcagcagtaaacggtaaagccgtcaacagttcatttgcccagagttttggttcaattgtgtaaccttgcggctgcaaaggtgaagattgttaataagtgaactgaacgattactaagtttacatcggattattttactccaaaacatttattggaggatttttttatgtcacgttatacaggtccaaagtggaaactttcacgtcgtttaggaatttcactatcaggcacaggtaaagaacttgctcgtcgcccttacgctccaggccaacacggtaacgaccgtcgcggtaagatttcagaatatggtatgcaattgagcgaaaaacaaaaacttcgtttaatgtatggtttaacagaacgccaattccggaacttatttgctcgcgctggtaaaatccgcgaaggcaagcatggtgttaacttgatgatcttgctagaacaacgtttagacaacattgtttatcgtttaggtttagcaagcactcgtgcacaagctcgtcaattagtaaaccatggtcacgtaactgtcgatggcaaacgtgttgatattccttcatacgaagtaaaacctggtcaagaaatttcaatccgtgaaaaatctaagaaccttgtaatcgttaaggatgcaatcgaaggcacagttggtcgcccttcattcgttagctttgatgctgacacaatgaaaggttcacttgttcgtttaccagaacgttcagaattagaaccagaaatcgacgaagccttaatcgttgaattctacaacagataagcagttatctgttcaattaaaagagtcagacttaggtctggctctttttttgcgcatttaaagacgcgtgcctacttagcacacgcgtctgatttaatctatttagtctgtaccaactcatataaaggcaccatcttcatcaaggtcgtttgaatatcggccatgagagcttcgggttggtcgaataatgggttgtctttcagataaacttttccgaggagccactccccttttttggtcttagcaaacttatcttgaatcagtttcaagttctccgatgacattgggaatttttgcttggtcatgtgatcgtagcttaaatcatagtcggcaaagtcccttaagaggctttctgtttggcttgccaataacggtgcgtaatccgtcttatctggcatctcagccattaaagcaaaccaaacgaagatccgatcatcccaaaaaccgacttcaaagtgcggtatcatcttatacccgcgtgagctctcactaagtgccatccaagtattcattggtggatttttgaagcggcgtaaatgcttggcaatatgcaacgagaattcgcgttttgtttctactacgagttctgcttgcaattgcacaccaaatacttcaaactttggatcaagttgcgtataaatcttgtctaaccggccctttaaggtttggtcatcaaaaatatcaaaatcagcacgtgtaaacatctttttcctccaacatggtatacttaggtttaattctaatatagcacaattcagaaatgaggcgactattttgtcagataatgatcaattacaacaacacttggatagtgccatgcacggcgcaccacaaaccaatcccgatgaacgccgccgctacctcggctcattacgtgaacgcgtcttcttaggcattactaaccaggaactcgccactgcgcaagctaaattcgaagcgcatcttacggattataagccctattccgtcttattaaacggcaagaaccccgctgctaccgattatttagcggccctttcagcacacgggattccgttcacgctcgttaacaacgaaacagccaaaaccgaaccaacggccttcggtttgttagtggttgccaaagacgcgattaaccatgaggcaattacgctcgatacactataccctgatccaaaaaccacaacgcaagatgcacccaccaaaaaaggtggtttcttaaaacatcttttcgattaacactaaaaaggcccgcacagtttaacttgtgcgggcctttttgcattactttagtcggtttcaatcgctaattctgggaaaagtaattgtaagacagtcattgaaacgcgccgcgcttgacccatcattgggaacaagtgcatcaacatcgctggattgtagtttgcttctagcacaaccgtcatctcagggtgctccggatcatatggttggtataagtttggcacaatgatatcgattcccgtgatattgaggttcaaaatttcagcaacctgttcagcaatcgcaaagtaactttgatccatctcatcggtcacgtcaaccgaatcaccaccatttgagacgttggaattttgtagtaagaagacctgtgaaccacgcaatggcacatcttcagggcggtaaccttgttgtttcaacatgagcaattcccgttcaccgaggcgaatgttttgcaacggtgtcaggtgcgcttcgccacgtaatgggttgtcgtttttcttagcaacaagttgggcgattgttgaacgaccatcccccacgacattggctggaatccgttctaaaacagcctggaccttatgattcatcactaagaaacggtattccgaacccgcaatgaattcttcaactaaaatttgctgatcgtacgtttgtgccagtttaaaagcagcaatgaagtccgcttcacttggacgcgttaaaaatgtggtaatgcccgcccccatgttactgtgttttggtttaatgacaatcgcgcgctgaccaaacgccgcttgataatctgctactgccgtctctaaagcggtatattcggcacccgctggcacccgcataccatgacttgccaataaaattttagtcactaccttattatccactaacggcccactaattagccgatctaaactcgttatattcccatttttgactaattcatgatgatgttgataggtcagctcaataaattgttcatcgcgatccaaaacagccacatgcaaccctttttggaaagcgtcaaacatcagcatttgtgttgataattccatatccgtgtatccctgtaactgatagggagtctctgtcagctcacatttaaaacgttttgcctgtttgagggcaaatgcctttagcgagtcctcttcaatcgcttgtgttaagcgataactcaaggtttgtcgatggtcctgaacacgctcattcatcactgtccaagcttgtttaaaacgctcattcagatgataatccgtaatgaattgggccaaatcggccatcacagttttcaattgtgtttggagctgcgatggctgcagcggattctctaatgctactgtgtcatttaactgacgacccgtctgaatctgagtggctaaatcaccggataatttcggcaaggataataagtacataaagaataagtgtaagaagtctagctgttgttgatcaatccccgtcgcagtatacgggttaatatcaaacccccgaaattctaaataatccacaccagtctctaacatctgatccaatgagtgactccgtaaccgcacagttccgtaaaattcgcgttccgaaattaagtcgccattagcaatcgcttggcgcattgaatcaacatatgcggcaactgaatcaaaatgaattaataattgcttattgctgtagccgaataattcactcgagcgtaaactccgtacagggtgttctggtaatttcgtcatatcttctaaaaagcctggttccgctatcggactcgcaccaaataaatacgttaaaacatagtgataacgcacgtaattttgcgcaatctggatgtacaacgcatcgctaaaatcttttagactcacatagtgatcatgatagtattcatcaaataaacgcacaattaacgtcgatgacaggctaaaattataatggatgccagagaccatctgtagacgtcgaccgtagcgcttcgtcaaatagtcacgataggcttttaccgccggtgtgtattctgaaattggaatggttaattcatcgtctggtaacaacggtggcatgctgaggggccaaatatattccgaatcggccatacttgattgcaatacttgttcgagcgctaataattgttgttggacatctacggtctgttcgaaggtatccgtaaccagttccgtttgcatctctgcaaaatcagtcgcaatgtatggatgaaacgttcgcgatcctaactcactggggtgcggttgttgactcaatgcgcccaatccggtcactcgctgcccctctttttcgaccccaaaagcaccttggttcaataaaggtgttaagcgtaattgtttaatgttctcaaataattgattaggcattttgaaacctcttcttaattcagtcttatacaactcattatacacatccctaaaaccttttaaaacgataatcactacgaatttgcgcgacatgttatactaggaacaacctaaacattaaaggatgaacgctatgcaacaacctctcgcatttcgcatgcgtccgactaacatcgatgaagttgtcggtcagacgcacttagtggggccgcaaaaaatcattcgccgaatggttgatgccaaactcctctcatcaatgattctctacggaccgcctggtactggtaaaacgagtatcgctagtgccatcgccggtagtacccagtacgcttttcgcatgctgaatgctgccactgatagtaaaaaagatttacagattgtcgctgaagaagccaaaatgagtggcaccgtgattttactcctcgatgaaattcaccgcttggataaaaccaaacaggattttctcttaccacatctagaaagtggccgcattatcttaattggtgcaactaccgaaaatccatatatcagtatcaaccctgccattcggagtcgggcccaaatttttgaagtcaagcccctcactgaagccgacattcatgtcgccattcaacgggcactgacagataaagaaaaaggcttaggtgcactagccatcaatctcgatgaaacggctgaacaataccttgcccgcgtcacaaacggtgatttacggagtgctttaaacgccctcgaactcgctgctcgttcaacaccagcgaatccagacaccaacgtcatcgacatcgatattgacgttattgaagaatgcgtgcagaaaaaagccattactcatgataaagatggcgatgcccattacgatgtcatctccgcctttcaaaaatcagtccgtggcagtgacgttgatgctgcgctccattatatgggccgtttgattgaagccggtgatttaatgtcgattagtcggcgcttgatgacaatggcctacgaagatatcggcctcgccaaccctcaagcctgtgcccgtacagtcgaggcaattgctgcggctaaacaacttggttttcccgaagcccggattccactggccgtagcagtgattgatctctgcttatctccaaaatcaaattcggccatcaccgcaattgataacgcgttagctgatattcgcgctggcaaagccggtgaagtccccgatcatctccgtgatgcccattatgcaggggctgaaaaacttggccacggtgtcgactacaaatatcctcataattatcccaacgactgggtcgcgcaagattacctaccagataagctcttaggtagtcattattacgaagcaaaagcaactggtaaatacgagcaagtcctcaaacaacagctagaacgcttgcgccaagccagtccgcataagtgaacggttacaaaagtgttgtgttaacatcacgagcgtgctactataatagtaggatttctaaggtgtgcgcgtcttcccaccttatgttgaccgatcaagtaattcgttaatgggacggatgagttattagcgagtgtagactttttcgcgaaggaaccaagtctaataataatctgacccacctgcattttctagcgggctcaactatcgggaagcatctacggcaccactagatttcccaaagtccaacgactttgaccgggctaacgtttacgttggcccttttttgttgattattttaggaggttgcacattgattcaaatcgccataatcgtttttttaatcattatcgccctacttggtgcgattttatgttactaccaagacaagaagttcctactctttgatttaactgaaaaccggcatttaggtcgattgatgtacttttcagggattgcactcatcggtgtagcgatctgcggagctttgatttactggctattgccactagtctggacattggtgacgctcgttgctgccagtttaatcgccggcttagtcggccttagctttgcaactaacctttaagatttacttttggcactgaactagcgtacaataaagatgtaaaattaaatgaggtgatgacaatgttacaacaatacaagcacattttggtcgcaatcgatggttcttatgaagctgaactcgctttccgtaaagcagttgaagttgcccttcggaataacggacaactccacttgattcacgttatcgatacccgcgccttccaaaatatctctagttttgattccgcaatggttgaacaagtcacagaaacagctaagaaaacaatggacgaatacatcgtgactgccaatgaacttggcttaaaagatgttgactatagcattgaatatggcgcaccaaagagtttaattgcccgcgaagtacccgaaaagaaaaatatcgatctcatcatgattggtgcaactggtttaaacgctgttgaacgtctcttgattggttctgtaacggaatacgttactcggaccgccgtttgcgacgtgctcgttgtgcggacagatttagataataaacacgcactcaacaagaaacacagtagcattggtcacgaagaagcataaattagcaatcaaaaagccgggacgcttatgtcccggctttttttagtggttaaccacttattcagccaattgttgatcaacttgcacaataatctctggatgatgccggattaacgccaatgttttagcaaccgttaaatcctgtaaggcgttctctcgatgaagcacatgttctgcacgaccaagaatgaaatacaatgcatcaagtaagtaaagactttgcttatcgattgcttcgtcaatcgcaagctgagcgtacttaatcgcaccttcataatccttcaattcaaaaagaattcccgctaagtgattataaatctgcaactcaacttggaaatcggccatagcaagtggatcagaattctccaacatttcaacggcttgttctgcataaatccgtacacgctctaaagcgcccttcatcaaataggacttgctaatgccgataatacatagaataccgtaaacatccgtctgagaaacaacgtattgattgaaggcacgattgaaaaaaaaaaagtgcatcgtccggtttattctccagcaataacttaatttgaccttggaaataataataccgtttgtaatcatctgctttgaccagttgatctgtgtagatctgctgaatcaaatcacgtgcttttttgaattcattggtaaataacaatgcttgcacacgactcaacaagacgtgtaattgatcatcttcttgcacaatcactgagtccaacgtaatttcaagccgcttacaaatttccaagagaatctttgtgcttggcacctgttcttttttctcaattaagctaattgttgcttgcgtacaaatccccttagctaactccgcttgagacatcccccgtgctttacggatttgttttagtttatcccctaatattctcattttaaatactccaattacatcattatttaatttaaaattaatttccggaaaatataacccaattaagtaatttacatcaattagcaatgacgctactagttgcgtttattatacactatgaactagttatgtggcattacttatttttttatccaataagtattttacactacatactaaacattaccaaacatttatctttaattaattgttaaggtgctgttcgatagtacgacaaaaaaacggcttcctgcagcggaagccgttttttataacgttgctaatattgccggaacttcttttaatgattcaatttgataatccgctgccgattgatcaatcgcgaaaagtggatcaaatggttttaatgcgatgacggttaaaccagccgccttccccgcttgaatccccagtgcagagtcttcaatcgcaaccgcctcggttggttctaaatgcattcttttaagcgcttctagatacacatctggtgctggtttattatgcgcaatctctgcaccactaacaaccgtttcaaaataaggttctaacgcggtttccaacaacatttgttgaataattccgcgctcaccagcggacgccaaaccgatttgatatgtcggtgcaacggttgctaataacggttgcgcgtctgggttcatgatatttttaaaaacgattggatgagccgctttatacgacgtatagccgtttttaattgccgctcgttccaaaacagtatggtttggaaacaactgttttaaaacggcattcatattggaaccaatttgtttacgactttcctctgccgttagtcgtgcgccaattgcattcaaaaatgctaagcgttgttcaaaatagtacggttcactatccactaaaacgccatcgacgtcaaaaataatcccttttactgtcatcttctctcaatcctatctggttaattaaaataaatctgaaatcttccgtaagtaatccgcaattttatcaggtaattcaggttgtagcaacaatgactgtaaaaagcgattgcggttataccaccgattccaaaaaccaacggtctcctgtggtgccatagtcaacaatgaacgctgccactcctgtaagacgattaaacaataatcgacatagagttgatgcttgttcattaaactgattagaacgttcgtcagatgactatcttcaccatatgcgagtgcgttatcagagaagcgatacgcctgtagcacaattgccatcatcaaaatcttatccgcacgttggatttcaggtgtttcgttaagttctgaccagacattgatgatatgcgtcatcgcatgcgcccagcctttaccatcaacgtatcctcgtgaatctaattcgatgactgtataagccattactcgccgttcaattgccaataattcggccgtacttaatacatgataaaaagtgcggttagcatataaaatcccggccaaaaacatcgcgctaaacgaacgtaaaaaaacagcgtcattttcaggttctaaaatatgcgcgaataaataatcatcttgcaataagcggtccttgacccaaatcaattgggctggggttaaaaccgtctgccgtaataatcgattgaataagtaaaaaacacctttatcgcgcacttgcgaatctgagcttgcaagatgccttaataaatcatcgagctcttcatcgctgatggtcgcttctttgcctttggttttaattcgctcatcaattgctgtgattcgttgcaagactgactcgttgtcctcaggtactacgacatgtgtccgccgcgtcttatattggacgccatccatgacgaccaatactttttccggaattgattgatagatgtcccctttaatcaatgcactacgaatcgcgtctaactgttgcatcacattttgaacttccttcatcaatcatcacccactctctactgaaaacatctcataactaactattataatgcattcggccacagacataaactatcaatccttaaacaggcccacgatatgacaaaatcgtcacctcgcttagaataaattccacctttagactgaatcaatgtaacttctagcttgatacgattaagacatcaattcacaaggagtgtcaatcatgaaaaaaatcattctattactgttctcacttggactaattgttatcggcggtccaattatcggatcagccacaactcagaatatgacggacggcaatgaccttgcccaacagtgggaccggttcaacctcttaattcccagagaagccgtctatgttaaaacagcacaccaatacgggacacaacaagcacatggcgattacctttaccggcaacctgcttaccgtactgatggcagtcattacgaagtcgttttccaagcgccgcgcgcactaaaacctaatcactacttaaaattagatgccaagggacgcttcgtcaattcttgggctgtcgtttcaaaatctgaattgcccgttaaactgcagtctagtctataattgtaaaatacaatcgaactaaatgctgttaattgcgaaatacaaacgagggatttcgcttttttcattgcttacatttaataagtatgctatattattcgcatgcactgataaaaacgatttcacaagggagtaatgaacatgacagaattattcgatttacaacaaacacgccggacaatttatgcacttggcaaaaacgtttcaatgagcgaagctgaattatcagaattaatcttcaacaccattaaagaaacaccaactgcttttaacgcccaaggttcacgcgccattattctctttggaaaagcaaatgaaacactttggaacgatattacagcaactgccttaaaaccattaacacctgcggaaaacttcccaagtacacaagctaaattggcttcattcgccgctggtgtcgggacaatcttgttctttgaagatcaagacgttgttaagaatcttcaagaaaacgtgccattatatgccgaaaacttcccaacatggtcagaacaagcttcaggcatggcacaatatgccacttggttagccctcgcagaaaaaaatgtgggcgctagcttgcaacattataacccagtaattgatgaagccgttactgcaaaatggaacattccatcaaactggaaacttcgtgcgcaaatgccatttggttcaatcgaaaatccagccgatgctaaagactacaataccgatgcaagtcgtttccaaacctacacaaactaattttaaaccgaatcgaccagagtgcgcatgcactctggttttttattttacccaacaaaaaaagcgactcgcatccgcgaaccgctttttactttaaggagaatgagagattcgaactctcgcgtgggcagaacccacctgacggttttcaagaccgttcccttcagccagacttgggtaattctccatatcaaatcttacaacgtttattataatatcaagttcgctaatcactgtcaagcctgttttttaaaaataactgctatttacacccgcccaccaactcggtatcataaaggggtgcatttaaaatcaagtaaaactacttggactggttcggaaacttcccagaataaaaaactaaggatctcaaggaggttagaaataaatgcaaactcgcaaaatcattatcgattgcgatccaggcatcgatgacacgctcgctttgaatttggccattcaatcgccagccgtggaagtcgttgcaatcaccattgtttgcggcaacgttcccgtccaaatcggcgtggacaatgcctttaagtgtcttgaacgcctcgggcggctcgacattcccgtttatgttggtgcggataaaccgctccataaaccatttgtcagtgcgcaggatacgcatggcatggatggtttaggtgacagccatatcccgcgcctatccactattcaaccggcacaacaatccgccgctgattttttagcagccacttttagtcaaccgagcgatatcagtattatcgcactcggaccattgaccaatattgcgactgcgctccagcgaaatccagatttaggtcggcactgtgcccgctttgtttcaatgggtgggacctataagagtcacggtaactgctcacccgttgctgaattcaactactggagcgatccggatgccgcactgttggtattcgaccaactcgatcaaaagattgaaatggttggcttagacgtgacccgcgaaattgtcttcacgccaacattgctggcttattgtcagcgtgtcaatcctgaagtcggcgactatctaaaagccatcacccagttttattttgattttcattggcaatatgaacacattatcggctgtgtgatcaatgatccattagcagtcgcctattttatcgatccaaccctttgtcacggctttgaaagttataccaccgtcgaaacaaccggcatcagcattggccaaacactggttgaccggttcgatttctggcaccgtcctgccaatagcctcatcttaactaaggtggacaccaatcgtttctttgaacagtttttgaccgtcgttttaaatgcacaagcaaccctcattaaaacggacttaccaaaacttagataaggaacctattatgcgaaaatttaaaacacaacacttaaccattctggcacttgccattgcactcaattacgtaggcgctaacattgccctatttttacggttaccaatctatctcgatagcgtcggcaccattttagccagcaccctattaggtcctctggcaggcgcattaactgccacttgcagtagcatcatcagcggtgtcacgaccgacttatttgcgctttattacttgccagacggtctattaaccggcttactcgctggatggttcttataccaccaccaacggacgaaacgcgagttaccccttgttgctttaggtgtcgccattcccggcacaattgtcagttcattaattacttacttcttgttccacggtatcacctcttcagggtcaagtttaattgtacaactactaagcggcttgggactaaatcagtttgtcagcattacactggttcaagccggtacggattatctggaccggctcttggcaatcattgtggtgacacaggtttgcgtccacctcaaacaaaaaatcaagacactctaatcaattaaaaaaaagcaagtgtgcttctaacatcaattagaaacgcatttgctttttttagttttgcatcagtaacgtgacatactgttctagataatctcggtcgacctcatcgtaagcgccaacgacgcggttatcaagatccaaaacaccgattagttgattagccttgatcattggcacaacaatctcagaacgtgcagccgaatcacaagcgatataattctgatgttgcgccgtgtcttctacaattaacgttgtttgctttgcggcggcttcaccacacacccctttacctagtgcaatgtgcatacacgagacgtttccttgaaatgggcctaaaatcagctcagcatcttgatacagataataacccgcaaaaacagtctccggtaatatttgatttaataacgccgaagaatttgctagattagcaattaaattcgtttcacctgccagcaaagcagcttgttgttttaagagcatttcgtaagcctcgactttagcttcttttgatttaaacatcacaatcacttcctcttttcaagctattatagtggaagcttgctgcgttagcaattcaaaacatcccttaatttcgacattaaaaaaaccgcacatcggcggtttttttaatgaaaaattgttttatttcttcgataaactgtctctggttcgccctcttcatgattgacgtaccgcgcaatcgcgtataaataatcagagagccgattcaagaaagttaatacagcttcgttaatcggttctacttcctgcaaggcgacgacttggcgttcaacacgccgcgcaattgtccgacaatattgtagtttcgctgctgatggtactcccccaggtaaaataaattcttttaaagcaggtggaacatctgcatactgatcaatcttagcttctaaccatttcgtgtatgcgttgtctgtccgatacccccgcgaatcatccggcgtcgctaaatctgtcccacagtcaaacagaatttgttgaatctcaaccaattccattctcaatgccggataatcaggtaaatcactgatgacgacacctaagtatgaatttaactcatcaacacccccgtatgcttccacacgaattgcgtttttgcgcactttttgaccgccgataattctggttaatcccttgtcaccggtctttgtatatagtttcaatccgtagcctcctaaaactgtcatccattatcaattttagtgtaccacgtttgaaagcgaatttttggcgttgcttaatttttaacacttgtctgcttgtatcaatttaagtaatgcctcaattcgacggtacgaaacatcacatgtatcgccatttgcaaatatcacttgatgcgtctccttatcaatccgtacgactttgtccggattcactaggatactcttatgggctctgaaaaattgtggcaattgcgcttgaatcgtcacgattttccctacaaattcacttaaccgatgatcactgtgtaagaagacgtgccgtgctttatacgctgtttcgaaataattaatctcttgaattgccactttttcaaacgataatccatcatcatattcaaaatgagctggttcttcagctaatggcacctgttgttgtcgtaacttaatggcatcgttaatggttgcttgaatatctgcacgaacctgtgctaacccgcgatccttcaaaataaaattcaaaacattaattcggcgttgaatggtttccattaaaagttcgtcatgtgttgaaacgaacacaatctgtgcatatggatccaattcacgaattttaagcgccaattccatcccatccagcacgtcattctctaaatcaatatcaagaaagtaaacgcccccttgcgtttgactttcttgtaaaaaaattaataggtcatagccattcttagtcttcaaacgcacctgagcatccaatatattttgttgaatatatgccgttataatctcttcataactatctagtaaaacctgtttatcatcacataaaaaaatatcaaccatgggtctcctcctgttcaacaacaagcattgcaacgaaatagtctccatcttgttttaacattaagctaaaatctgagcgcatatccgtgatttctttagcagttgtgagcccaagcccgcgattaatccccttcgttgaataaccagcctgataaagctgaccaaattctactggtgtattaatcgtatttttgacacaatagaccatcttacccttttgctcgaataaactgacactgattgaaccatctttaatatcatttaccgcgtcaattgcattatccaaaaagattcccagaatccgtaattcatcaaaatactgttgttgttgcttaaataaatccggttgaacctctaaattaaagggaatccgattattatgtgcttcaatatacttgctaaaaataatgcctttaatataagcattattaatctcttgaaaccgtccaattgcctgatcttgaatcgtgtcaaagttataatgcgttagtaaatcatgaaaatcctgcattaaaactgggctcccttgttcattgataattgtctctaaagccaataaagcattggcgatatcgtggcgaaacttgcgtatttcacggtagttacgctctaactgttcaacatacagcgttagatttcgctgactttcttgttctacgttgattctattttggcgaatcacagctttcgtatacaaaagcattcccacaatcaccaaaactaatagtaatagcacaagtcctaacacaaggtacaaatattcaaccggcagattcgcatgcttaaagctatcaaaaagcaccatcactgccaccacaaataacgcgagaccggctaaaatcgtgccggccacgcacataccgtatgaagcaatggatgctttaataagctgatctaaccgttggacaattaatcctaatccggctgcaatcaataattgactcaacataattaaacacaccatttgccaattaaactggctactcatcagattatcaaggccctttaagtgagtatacccaattaaccccaccgttgtcagaaccgatgatagcatcacgatgatgtaactaaagatggttgcgataattaacgcataacttgtctttaatttacgcagatttttaaagccatttaaccaaccatataatccaacagttgccaaaatcagccatagctcttcaagaaaatttccaattaataaatccattccctgaataaaagcaatgccgactccaactgataatagtagttgaaatctgttcgttcgtttcaacttccccgtcaaaaataatactaatagtagaaacgaactaaacgtacttagattaatgacaatctgcattgccagcggcattttcattgccatgcataaaactccctactcgaaccttaattccaaaaccagaaaattaaattttgaatgttactcatcattatcatacccctcctttcatattatgaatacccatgattggtgactcatttcgattttatcacgtaatttttttaaaaggattaaatgtcataaacgtatacttgtctgcattaaacgtatataattaatcataaatatagataaataattactatttggaggctaaaaatgtttttaggccaattgatccatcaacagcgactcaacaagcaactgacacagtctgaattagcagcggggatttgcacgcaaaatacaatcagcaaaattgaaaagaaaaatctgccccccacaatcccaattctaattaagatttgtacacggcttggattgacattaaatgaacttttcaccgaatttaacgcgctcgacactgccagtgacgaaggcgtgatttctgcggaagttgctttattagcaggcgattctggccctgctgccgcattaattaccgatatcgacttcaaggcaaccgaacatccttatcccgccatcttcttctttttcaatggctatttaagttaccttgaccatcaatctgaattacagattttttccgcttataactcgttcacagcggccatcggtgacgacacttcaacgttgaagttacttctaaataccggtatgggtttaatttaccaagaagctggcgaggaattagctgatttttatttcaataataatatcaatttcatcaaccaacttgatcacatcaatgtcattgatgttcaacgcgtcctatttgcttcgcgtcacacagcagcctatatgattaaccaacaccgcattgatgcagctatcgagtttttgacgaaagccctcaaactgagtcaaaaaaatcaaatcatcaaacaagtcgatcatttgtattacctccgtgctcgggcgcgccaacaaagcggtcgagactatgcagaagatcgcgaaaccgcgttagtttttgccaaataccttaaaaataacgcgttaatcgctaaaattaaagcgttaaactaaaaaacactatccgattggatagtgtttttttaactaattggttgaacgcgactggcaatcatcaccactaagcaactcttgatcatttcaatcggaaaatacggcacaaaaccggtcattaagccggtcactacggataattttaatgaccagattagccagagtgtgccaaatccgagttgaataatgcttgctagcacattgccgccgagaagtacgcgattcgattgtccaaatagttgctgactatagtgaataattgccacataagcgataaaaccaatcagatagccgcctgttggtccgaccagcactgcagccccactggcataatttgcaaagaccggtaagccaagcatgcctagcatgagatagctcccgatgaccagtcgacttaagcgccatggtaacgtggtgccaattacaccaactgcgagcgtttggagtgttactgaaaccagcgaaatcggtagactgacttgagcgctaaccattaataacgccaagcacatcccgactaagctaacttttctggcaaccgatagtgtcatttaaatcagctcctccttaaaatcaatcttttggccgactgccacttgcgagccattgctcagaattaacgtgccatccgctaaaagctgtgtaatgacaagcccattttgcaaacgtcggccaataatcgccgaccagttgcaataatgagcaccaatcgcctcgtccgcttgggccaatccggccgctagtcgattaagatacgtggcacaaaattgattgatgttcacttggtgggcgtttacggcttggcttacatccattatgaaactgccgctgccgtcctttttgaatatgtgcatgctttctacaataggaagagaattcatagttcactgggctaccagacccccttacaagttgaaattgcaacacttacgagccaaatggccgcctgatttaatgctttccagggttcaaataagttattaatcgcgattaatgatttatttgagctgtggaaggtaaacgcggttctgaatgtctcttaaaatctgtctcaaatattgacttcaatccatacctcctataatttttattttatcataccatttaatactgcatactagttaaatctctctaaaaatttctatccaaatggtgttacttttggtgttactttctacatgcacaaacaaaaaaagccagaaacgccttcaaataagcatttctagcttatgcaattcaattaccccacactgccttccatttcataactaatcagtcgatttaattccaccgcgtattccattgggagttccttggtgaatggttcgacgaagcccatgatgatcatttcggttgctttggcttccgagatgccacggctcatcagataatagagttgttcttcagaaattttagagactttggcttcatgttccattgagacgttgccgtttagaattgtgttgtacggaatcgtatcagagctggagcggtcatccataataatcgtatcacattcgacatgggcaaacgaaccgtcactgtcgcgttcaaaacgaacagtcccgcggtaatcaacggccccgccatctttggcaatcgattttgaaacgattgaggatgacgtattcggtgcggcgtgaatcatccgcgcgccactgtcttggtcaacgccttcgccggcgacggcgattgagagcattgtcccccgtgcaccttcaccatcgaggtagacacttgggtatttcatggtcatttttgaaccgagattcccgtcgacccattccattgtcgcattttccatggcttgggcccgtttagtttccaaactataaacgttctttgaccagttttgaatggtcgtgtaacggcaatagccatcccgtttcacaaagacttcaacgaccgctgcgtgcaagctatcacttgaatagcttggtgcagtacagccttcaacgtagttcacgctggcgccttcatcgacaataatcaatgtccgttcgaattgacctgaattttcggcgttaatccggaagtacgattggattggaatatccgtccgcacgccttttggaacgtagatgaacgtgccacctgaccaaacggccgagttaagcgctgagaatttattatcagttggtttgaccaacgtactgaagtattccttcacaatttcagggtattcgcgtaaaccggtatccatatcggtaaaaatgatcccaagtttttcgaattcttcacgcatgttgtgataaaccacttctgattcatattgcgcactggaacctgctaaatacttacgttcggcttcaggcacacctaagcgatcaaacgtttctttgattttgtcgggaacatcttcccaatcgcggtattgcttgtccgttgccttttgataatacaacatgtgttctaaatcaagatcggataagtccggtccgaaatctggcattggcattttttcataagcgtgaaatgattttaagcggaaatctaacatccattgtggttcttttttctcacgcgagatggcgcgcacaacgtcttccgttaaaccgcgcccagttgaaaagacgggctctacatcgtcgctaaagccgtagtcgtactcttcaaattggggcatcgttgtctcttctgtcattcgttagtttcctccgtttctgcgtggttcatcatttgaccggttgttgcacgtcggtcatcgctatttaaggctttgtggagcgccttccaagctaaagtcgcgcatttaatccgcgcagggaattgttgcaccccttgtaaaatcgcggcatcttctaacaatgaccagtcttcgtcacgatcaccaatcatcatatccgaaaagcgttcgatcatcgcctccgcttgcgccggtgtcttatgcatcacggcatcggtcatcatgctggcagaagcctggctaatcgtacagccttcccctgaaaaagcaatctgactaatctgcccgtcttcgagcaccagttcaagttgtaacacatcgccacaggtggggttgcgtaattcaatttcatgatcggcagtcgtcaagtgaccatgatgatgcggatgttgcgaatggtcaagaatgacctgccgatataagttatctaatttagagagtgccattttggaaaaactcctttgctgcttgaatggcggtcacaaacgttttcacgtccgcttcggtattgtagaggtaaaaactagcgcgcgcagttgcggcaacgttcaaccattgcatcaacggttgtgcgcagtgatgaccagcacgtacggcaacgccttccatatcgagggcggtcgctaaatcatgtggatgtaaattgtcgagattaaaggcaatcacaccggtgcgttgggcggcatcttgtgggccataaatcgtgaggccgtcgattgcttggagctgcggtaaagccattgtgactagcgcttgttcatgggcttggatatgatccatcccaatttgcgttaaataatcaatggcggcccctaagccaattgcccccgcaatgtttggcgttccaccttcaaggcgccacggtaattctttaaacgttgaagattgtaagcccacaaagtcgatcatctcgccgccgtattccacgggtggcatctgttcaagtaatgcttgcttgccataaagcacaccaatgccggttggtccaagcatcttatgccctgaaaaggcgtaaaagtccgcatcaagtgcctgcacatcaaccatcatgtgcggcacggcttgtgccccatcgaccaccatgtaaccgccttgtgcatggactaaagccgcaattgttttaatcggattgacaaccccaagtacgttggaagcatgcgccaaactaacaattttcgtcttaggcccaatcacctggcgtgctgactctaaatcgagttgcccatccggtaataagtcgatgtaacgcaatttcgcgcccgttttctgcgccagttgttgccacggcacgagattactatgatgttccatcacactaatcacgatttcatcgccggcttcaaccacggttgggccgaaactgcctgcaacccagttcaaactttgcgtcgtcccttttgtgaaaatcacttcggcactcgcagcggcatggatgaaggtttggaccttcgtgcgcgcggcttcatactgggcggttgctcgttcagctaaagtatgcacaccacgatgcacgttcgcattgtcattttggtaataagccaccaaccggtcaatcacggcttgtggtttttgggtggtcgccgcattgtctaaataaacaagtggttcatcattgacgatttggtctaaaatcggaaagtcgcaccgataatcatttaactggttgaccatcgattaacttcctttcaatcgtgtccgttaattgttggcgcacgtttttatccggaatttcacttagaacagcgcctaagaaaccacgaattacaagtcgttgcgcgacttcttttgaaagaccgcgactcattaaataatacatttgttgttcatcaacgcgcccgacactggcagcatggccagcttgcacgtcattttcatcaattaataagagtgggttcgcatccccgcgtgctgtccgcgataacatcaagacgcgattttcttgttgggcatcggcacccttagccccttttaaaatatgcccgatcccgttaaacgttaacgtcgcatcttctaaaatgacgccatgttgcaagatgtgcccaattgaacgcggcccaatattcgtcacacgcgtatcaatcccttgaatctgtttaccagttgagatggcgaccactttcgtttcagcatgtgatccagcacccactaaatcagaatcaaagtcaccgatgatattgccatcattcattgatcccaatgcccaatcaatccgcgcatcgcgcatcaagtggccccggcgattcaagtaagtcgtcacggattttccaaaggcatcaaccgctgaaaaatgaacgtgactgttatctttagcaatcacttccacgacaacatttgctaagttcttgtggtcacccgctgtttggagattttcaagataactaaattcactgttttgttcggctactacgaggacgtgatgaataaaatcagcgggttgagtgctgtcctgtacataataagccgtaatgggttgcttaatcaccacatttttcggcacatacaagaagagcccactgttcatcaaagctgtgtgaaaagccgttaagcgatcctcgttcggtttcactgtgacttgcatgtagtattgttgtaccaaatcaggatgttcttgtaacgcggtgaaaatgtcggtaaaaatgacaccttgttctgccaattctgccggtaaatttaacttggcagttgtctgaccaatctgtactgcgtacggttgatcagctgaaagattcgctgccgcagatggcattaaactcaaatcggatttaacggctgttggcgcatttgctgccatcactggccaatgtttatagttaattttttcaaagataggcagttcgagttgctcaatttgcgcaaacgctgcttgacgcatttcagcaaaccaggccggttcttgatgcaattgtgagaatgacgcgatttgttcaggcgtgatggctaatgttttcttcatcagaatcgccccctatttactttcgtcgtcagtcagtttgatatccaagcctaattcgtcacgaatcccgacataaccttcgtcttccaaacgttttgcaagtgacgcatcaccagtcgtgacgattttgccacccatcatgatgtgcacataatctggcacgatgtagtttaagagccgttgataatgtgtgatgattaatgagccaaaatcagccccgcgcatttcgttcacgccttttgaaacgacttgcaaggcatcaatatcaagtccggaatcaatttcgtctaggatggcgaatttgggttcaatcatcatcaattgcagaatttcattccgtttcttttcacccccagaaaatccttcgtttaagtaacgttctgacatttcttccgtcatatccaagaatgccatccgttgatctaattttttcaagaaagccatcactgaaatctgatcatcttcagcccgacgtgcattaatcgccgcacgcatgaattcagcgttcgttaccccttgaatttcagcaggatattgcatcgccaaaaataaccccgcacgggcgcgttcatcaaccggcatttctaaaatattttggccatctagtttgatctgaccttgtagtacctcatacttgggattgcccataatcgtttccgaaagcgtcgacttcccagtcccgttaggtcccatgatcgcgtgaatttcacccgtgttcatttccaggttaacaccttttaaaatttccttaccgtcgatgccgacgtgcaaatcgataatctctaatttagacatagatgatcctccaagaatcgcattctagcaattattatacgctcttaattctatgctaattgagaactgttttcaatgcttgaatgcatgaaaaaagaccacgcggacaacgtgatctttttcaatagattcgcacgggaaataggttaatattactcattgatttgatactcttctaaaaccgttgagccatttggtcagccacaatacgccggtctttgaagattatgaaactgccgctgccgtcctttttgaatatgtgcatgctttctacaataggaagagaattcatagttcactgggctaccagacccccttacaagttcaaattgcaacacttacgagccaaatggccgcctgatttaatgctttccaaggttcaaataagttattaattgcgattaatgatttatttgagctgtggaaggtaaacgcggttctgaatgtctcttaaaatctgtctcaaatattgacttcaatccacttatcacattagccaaaagtaaatcagaatatatcttcgactggaatagtttcaggcaatctcaacaacttcaaaaattactaaaacagttagatattacaaaaactacctttcatggtctaagagatacccatgcatcttttctattttcaaaagatataagtattgattatatctctagaagacttggtcataattcaattttaactactcaaaattattaccttgaattaatgccagaaaaaaagcaccagcaagatgctgatgctttaagtctattaaacgatttatcataacaattaacaccaaacgacaccaaagaattggttgcatcgttgatataacaatattttgattaacgttttgagaattgacttgctttacgagctttcttaagacctggtttcttacgttccttcatacgagggtcacgtgttaacatgccagcgctcttaagagctggacggaagtcagggtcaactgtcaatagggcacgtgaaataccgtgacggattgcaccagcttggcctgagaatccaccaccattaacgtttaccaagatatcatagctatctgttgtttcagtaattgttaaaggttgtttcatatctaaaatcaagttagcaaatggaatgtaatcaacaacgtctttgttgttgatagtgattttaccagtacctggtactaaacgtacacgagctactgagtttttacgacggcctgtaccgttataagttacttgagccactatagtttcctccttaaataatgtccgtaatgtctaagacttctggattttgtgcttggtgtttgtgttcgccaccagcgtatacgtgtaacttcaagaattggttgtgacccaatgagttcttaggtaacatccctttaactgacatttcaattaaacgttctgggttgttttcacgaatttcgccagcagtccgagttttcaaaccaccaggatggttactatggtgatgatataacttgtcggttgctttgcgacctgttaatttaattttttcagcgttgatgacgatgatgttatcacctgtatcaacgttaggtgtaaatgttggtttatttttaccgcgtaagatagaagcgactacagttgatagacgacctaatgcaatatcagttgcatcgatcacataccatttacgttctacttcgcctggtttagccatgtaagttgtacgcacgatttattcctccaatattctgtgtttgtttgacactcaataagtttccggggcctatcgtggggcaaacaataccagatactatagtatcgtaattttacgattaagtcaattgaatctcaattattttcatcagtttcgtaataaacttttttaaggtacaaaccgcttgctggcgcggttgagcgagcttgttgacggtccttaacttcatacagccgtaaaaaatcgtggacatcccgccgaccgttaccaatttctaataaagttccgaccaagatccgcaccatgttatacaaaaagccgttcccataaaactcaaaaacgagttcattttcgggttcattgaaaacaacggtcgcatcataaatcgtccgcaccttatccttaatgaccccacctgaagacgcaaaactcgtataatcatgcgtgcccatcacatctggcagcgccgcttgaatccgttccacatcgattggatacggataatgaccggtataacgtcgcttgaatggattcgtataatgcccaagatcgacccgatacatataccgtttaccgaccgttgaaaatcgtgcatgaaagtcatcatccgctaactgactatccacaacctccatatcaagcggtaagaggctatttaaggcccgtaacatactaatagcgggtaattgacctggatagtcgaaatggaccacctgccccgttgcatggacacctgcgtccgtccgccctgaaccatacacttgaatataagcacccttactcatctttgtcagtgctttttctaatgtgccctgtactgttcgttggttcggttgcacttggaaacccgcaaaatccgttccatcataggcaattgttacgcgataccgttgtgtcattttatccctcttgtgttaaaaagttagtagttctattctaaataattttctgaaaagtagcaatctttttatgaatgttcgtaaaaaatttgatttaaaaatgcatttttaatataaaacaagttcaaatgctgtataactattattataagtagaaataaggagaattgtgcaatgaagttcggatacgcacgcgtttcatctgccggacaaagtctagcaacccagattagtcaattaaaggaagaaagctgtgacattatctacagcgaaaagtttaccggaactaccgttgatcgccctaaatttaatgaactattagatcgggtttcaagtggtgataccatcgttgttacacaacttgatcgcttcgcaagaaataccaaagaagcacttgaaatcatccaagaactttttaaagcccgcattaaaattcatattttgaacatgggcatcattgaagacaccccttccggacgactcatttttaccttatttagtgcttttgcgcaatttgagcgcgatatgattctcactcgtacccaggaagggaaacataatgctcgtgtcaccaaccctagttacactgaaggtcgtaaaacgacctatactgatgatgaacatacaagcagccctagacatgcgtgaagagggctttacgtacgctcaaattagttaccaaactggcattagtgcttcaacgttgaaacgtcggttcaaaaaacaagctaatcaaaaaagtgcaaaaaaaaaggactcagctaaatcaacctccgttggtttaactgagtcctttttgcgttatcttaagaataaaagtgcgacggttaaaaggcccatcgtgataaatgccacggtgtctcttgtccgccatttcaaaattcggtacttactgcggccttcgccaccttggtacccccgtgcttccattgccgttgctaaatcatccgcgcggttaaaactgctgacaaataacggaattaaaatcggcacgattgctttcatttgttggaataaattcccttcaccaaaatcaaccccacgcgcacgttgcgcatccataatcttagtggtttcatccatcaatgttggtacaaagcgcaatgcaattgatagcatcaatgcaacttcatacactggaaaatggactactttaagcggcttgagaattgattcaatcgcatccgctaacgacaatggcggcgtcgtcaatgtcaggagagtcgacatgaaaataatcaatacaaagcgcatgaagatgtagacgccattaatcagcccgtactgggtaagcgtcagaaatccccactgccaatagacatgaccaccacgggtgaagaaaatctgtaagagcactgtaaatagaattagccataacagcggcttaactcctttaataaagaaggcgagtttaatttttgaaatcccgattagcgctaacgtaaagaccagtaataaagcgtaggcttgccatgtacgcgctaaaaagatgatcccaatataataaaaactggctaataacttcgcccgtggatccatccggtgtaacactgaatcaccggggatatatcggcccagaattaatttattcatgtccaatccccgccttcttcggtagttgttccgctaataaggcggccaattcatgttcggttagtggtacttgatcaaagacaaagccttgtcgcattaaagcttgcgcgaactgagtcgttgttggtaagccaagttgtttttccgttaaccaatccggatccgcaaaaatttcgcgtggtgctccggtcttagctagcttgccatgttccaaaacgataacgttgtcggcgtagttcgccacatcatccatctgatgggtgaccatcacaatcgtcatcccctgctcactgtgtaacttttcaaaaagcgccatcatctcacgccggccaactggatcgagccccgcggttggttcatctaagaccaatacttccggtttcattgccaacacaccagcaatggcaacgcggcgcatttgcccaccagataaatcaaaaggtgacttgtcaatcacgttagcgggtaaaccgacgagttcaatcatctctttagcgcgttcaagtgcttcagcttcagggacaccgaagttctgcggaccaaaagcaatatctttttgcaccgtcgactcaaataattggctttcaggaaattgaaaaaccatcccaactttttgacgaacagcctttaagtttttgttgttggtctcaggcgtgatttcgcgctcaccaatctgaacaacgccgctcgttggttttaagagtgcattgaggtgttggagcaatgtcgacttgccactacctgtatgaccaatcaaagccgtataggagccacttggaatggtcacattgatattttctagcccaatcccttgaaaaggcgtgcctggctgataagtgtagcttacatttttgaatgtaatgtccataagtactcaaccatcctttccgttgtgagataatctgtgggcatctcgatagcgcgttcatttagcgctgctttaagtttttctggatatggaacatctagccctaaatcaagcaaacgttgcccatatgcaaaaatatcggccggtgtgccctgatcatgcacttgccccttatctaagataatgatccggtccgcacttgcggcttcgtcaatatcgtgggtaattgataacacggtcatgtttgtttcttgttttaacttatgaatggttgcgagaacttcttcgcgcccttttggatctagcatactggtggcctcatcgagaatcagaatctcaggttgttgtgcgatgatccctgctaaggccactcgttgtttttgaccacccgacaaacggcttggttcacgtttcaagtattcactcataccaacacgttcaaccgcgtctttaacccgttcaatcatttcagctcgcggaatcccctgattttcgagaccaaaagcaacatcgtcttcaaccgttgcaccgacaaattgattatccggattctgaaaaaccatgccaattttctggcgaatagtccacacgttatccaacgacaatggtaacccatcaatcgtcactgatcccgattgtaaatctaacaaaccgttcaatgatttcgcgaaggtactcttaccactaccgttatgaccgataatggcgacccattcgccggcattgatactgacagaaagatcattcagtgctaaatgtccttcagattgtgggtattcatattttaaatgttcaacttgaattattttttgctcattcatgattaataacccgtattttccttggaattaaagtgcattggttatgttatccatgcacgtttcaaatcaaaaacctgttcctattttatcatataaaaggccatagcgctttcgttagtcaccctttattcaaaggatatccaacacaaaaaacgtctaactccgatttaactcggaattagacgttattttatgtaaatcatcaatcgatgaaagccatactgtgttgctagtatgaccttaggactagactcggagtacttccatcatcataacgccctgtctcatcgatcaaatgacctaaatcattttgtgattaaacaagttcaataatcaccattaatgcaccgtcaccacgacgaggggctgttttaagaatacgtgtgtaaccaccatttctttcagcataacgtggagcaatgtcactaaataatttttgtaaagcagattgaacgattacagcatcgtcttcttcgcgaatatcagctacttcgttacgaacgaatgctgcagcttgacgacgagcgtgtaaatcaccgcgtttacctaaagtgatcattttttcagttgttttacgaatttctttggcacgagcttctgtagtaatgatacgttcattgatgattaaatcagttgtcaaatcacgtaacattgccttacgttgtgagcttgtgcgacctaatttacgataactcatgaatggagtccctccttcttatcagtttattcttctgtgcgtaagcctaagccaagatcaaataacttgttcttaacttcttctaacgacttgcgaccaagatttctaactttcatcatatctgcttctgatttgtcagttaactcttgaacagtgttgattccagcgcgtttcaaacagttgtatgaacgaactgataaatctaactcttcaattgtcatttcaagcattttctctttatgtgtctcttctttttcgaccatgatttcagcatttttcgcttcatcagtaagatctacaaagattgccaaatgctctgtcataatcttcgcagctaagctaatagcttctctaggactgatggaaccgtttgtccaaacatcaagtgttaacttgtcgaaatcgttacgacgaccaacacgtgtactttctacttgatagttgacacgactgattggggtataaattgagtcgattggcaaaacaccaattggcatatcgtctgacttgttttgatcagcagcaacataaccacggccttttttaactgtcattcgcacgtggaaattgccgccttcagctactgtacaaatatattgatcagtatttaagacttcaacgtcatcatcagaaatgatatcagcagcagtaactgttgccggacccttaacatcgatttcaattgtcttgtcttcttcaacatgcaatttaagtgctaattttttaatattcaagatgatttgtgttacgtcttctaggacgccatcaattgttgaaaattcatgtaaaacaccatcaatttgaatatctgtgacagcagtacctggtaaagaagcgagtaaaatacgacgtaaagagttacctaaagtcgtaccatagccacgttcaagtggttctacaacgaacttaccgtagttagtactttcatcaacctttgtaatgtttggtttttcaaattcgatcattcttatcttttacccctttcaaaacgagaagtgtttatacgtgaacacgtttcagtttgtctcaaaatgaagcgtagcccagactaaacacgacggcgttttggaggacgagatccattatgaggaactggtgtaacgtcacgaatagcagtaacttctaaaccagttgcttgtaatgagcgaattgcagcttcacggccagaacctggtcctttaacagcaacttcaacagatttcataccatgttccatggcttctttaccagcagcttctgcagccatttgagcagcaaaaggtgttgacttacgactacctttgaaacctaatgaaccagcagatgaccatgcaacagcattcccatgaggatcagtgatcatcacaagagtattgttaaatgttgagtgaatatgtgcaacgccggcttcgatatttttcttcacacgacgcttacgtggagcatttttcttgtttgccataaattataacctccttttactgattatttcttcttgcctgcaatcgtaactttcttacctttacgagtacgtgcgttgttcttcgtgttttgaccacgaactggtaatccacgacgatgacgcatgccacgataagaaccgatttcttgtagacgtttgatgtttaagctaacttcacgacgaagatcgccttcaactttaactttgtcgattgctgcacggatcttgtcttcttgatccggcgttaaatcacgagtacggacgtcttctgcgacgccagcatcagccaagactttaacggcagttgtatttccgataccgaaaatataagttaaagcaatcacaatttgtttatcacgtggtaaatccacacctgcgatacgtgccattcttgcacctcctgcttaattaatattaaccttgacgttgtttatgttttgggttagctgcgcagataatcataacgcggccttttcgtttgataactttacaatgttcgcacattggttttactgatggtcttactttcatatcgactgacctccttgatatgatccttacgcctatttaaagcgatacgtaattcgtcccttagtcaaatcatagggtgacaattcaactgtcacacggtctccaggtaaaatcttgatgtagttcttacggattttaccagaaacgtgtgccagaataactgcaccattttcaagttctactttaaacattgcatttggtaaagtatcagttactttaccttcaatttcaatgacgtcatcttttgccacgcaaaagtacccccttgtggttgtgaaaattcatacagaaaaatggtgagagctctccgcactcaccgctagtggtcataccgagatattatatcacaagtattaaatttttaaaagcactgagaattctgtcattaaacaactagtcaggcttttacgtgaacaatgaccgtgagatcacttgagttgatgactagtctttaatggtatcaagtactttttgaacggcagagaacacatcatcaatttcttgattcccatccaccgtgtaaagtaggttacgtttttcataataatcaagtaaaggtgtattcatttcgatattgacctttaagcgattcttaaccgtttcaggtttgtcgtcttctcgttggaagaaaacatgttcgccgcaacgatcacatgtaccttccactttagttggatggtaaagtttgtggtacgttgcaccacaatttttacaaataaagcggccagataaacgatcagccaagatttcaggatcaacatcaatgttaatcacaccatctaaaggtttgttcaatttatcagtaatggcagctaaagcatccgcctgatcaagagtccgaggaaaaccatcaaggagataacctacattagtatctgcttgtgcaagacgttcctcaacaattccgttggtcacatcatctggtaccaattcacctttatcgatgaatgacttagctttaaccccaagttctgtttgatctgccatagcagctctgaacatgtcaccagttgaaatgtgtggaatatgataagcgtcaacaatcttttcagcttgcgttcccttaccagcgccgggaagtcccattaacatgagattcatgcctttgcctcctatttaaaaccaggattcaatactttttaaacgataattgcttatcgaatgaatccaacatacttgcgtttcataagtaacccttcgagttgacgtgtgctttcaagcgcaacaccaacaacgattagtaaactcgtcccacccaaaccaattgattggggtaagccaccgaggtttgctgctaattgtggtaataatgcaattaccccaaggaacaacgcaccgacagttgaaagacgcattaatacgctagaaagatacttctcggtacctttacctggccaaacacctgggatataactcccttgcttagtcaagttctccgcaactttttcagggttaacctgaacaaaagcatagaagaaggtaaagagaacaatgagcaccgtataaacaatcgaacctgtcacagtctgcatgctgaagatatctgataatactttaaaccaagtatctgcaccatgacctgattggaaggccattaagattgtttgaggtgtcataataaatgaactggcgaagataaccggaatcacaccagcgacgttaactttaaggggtaggtaactattttcacctgcaccagcttcacgacgcgtatattgaatcggaatctttcgatttgcttgttggacccatgtcacaaatgtgacaatcacgagtactgcaataatcaaaccgatgatgaataagacacctttccacatatcgccttttgaagcgttcaagacttgttcgcggaagatttggtaaagaccgcttggaaggcgtgcaatgatccctgcaaagatgatcattgacacaccattccctaagcctttatccgttatctgttcacccaaccatgtaattaacatcgtaccacccgttaaaatgatcccgatgctaacgaaggtcttaatccccggatctttaaccaagcccatttgactgagtgagttaaagccagcggtaatccctatcgattggataaatgctaagatgatggttaagtaacgcgttacttggttaagcttacgtcgcccaacttcaccttgcttgctccattcaacaaacttaggcacaatatccatttgtagtaattgaaccacaatttgggcagtgatgaatggtgaaacccccatcgagaagatggaatagttcgccaagccaccaccacttacggtatcaagcaatgggatcaaaccagttgaacccaacttagtcaatgcaccagcattcacacctggtaccgtaatttgtgcacctaaacgataaacgatcaaaacgcctaaagtaaacaaaatcttactacggatttcctttactttaaatgcgtttttgagtgtctttagcaattaaatcacctcaattgaaccgccagcagcttctacagcagcttttgcagcttcagaatacttgcttaccttaatgttcaattttttgtttaattcaccattcgctaataatttaacacctgataattcattcttaacaacgcctgcttcgattaaaacagttgaagtaatttctgcaccgtcttcaaaacgatttaaatcgtttaagttgacaacagcatattccttacggttgatattcttgaatccacgttttggcatacgacggaataaaggcatttgtccaccttcaaatcctaaacgtactttactacgagctttttggcctttttgaccacgaccagcagttttaccagtacctgaagaagtaccacggccgacacgtttacgaacgtcacgagcaccttcgttaggtttcatttcatgtaatttcattattgtgcgcacctccttgcaatatatgttgaaattagtctttaatttcttcgactgttactaaatgtgcgagtttgaaaatcacaccgcgagttgcagcatcatctggtttgattacagaactatttactcggttcaagccaaattctttgaccattttacgttgttctggaagacgatgagcagcactttttcttaaagtaatctttaatttagccatgttcagttatcctcctagttttgtaagctttctacagatacattacgtaattctgcaatttcttcagcagtcttcatacgagttaaaccgtcaattgtggcacggataacattgatagcagttttgctacctaatgttttacttgtcacatcatcgattcctgctaattccatgacggcacgaacagcaccaccggcagcaataccagaaccttcaacagctggttttaatagaacacgaccagcgccgaagcgaccaataatttcatgaggtaatgttgttccgaccttaggaacattgataagattctttttagcgtcttcaacggctttacggatagcttcaggaacttcttgtgctttacctgtcccgaaacctacgtgaccgtctttatcaccaacgattacgattgctgcgaaacgtagacgacgtccacctttaacaacttttgtaacacggttgattgaaacaacgcgatcttctaaatctaaatgagttggatcaatgtaagtcataaatggttttcctccttattagaattctagtccgttttcacgagcagctgtagctaaagcttcgatacgaccgtggtataagtaaccgccacgatcaaaaacaacaactttatggccggctttaacagcgcgttgtgcaactaatgcgccaacttgttgtgcttgttctactttagtaccttctgcttttacttctttatctaatgttgaggcacttgctagcgtcacacccgctacgtcatcaataagttgagcgtagatgtttttgttagaacggaaaacgttcaagcgtgggcagtcagcagtaccagagatcttgccacgaacgcgtgtatggcgtttttgacgtgtcttattcttgtctggttttgtaatcacaattttcacctcttaatatcgtttaacagctcaggctgctttatttaccagttttaccttctttacggcgaacatattcatcagtataacgaatacctttacctttgtaaggttctggaggacgaacatcacggatttcagctgcgaattggccaacttgttgtttgctaataccgctgatgatgatgtttgtgtttgatgggacttcgactgtaacgccttctggggcttccatttcaactggatgtgaatacccaacgttcaatactaaagtcttgcctttcaattgagcacggtaaccaacaccgataagatccaatgtcttcttgaaaccttccgttacgcccaagatcatgttgtttaagttagcacgcatagtaccgtgcattgcacgatcactttcactattacgtgtaaagttgataaggttaccttcttcgtgcatttcaatcactggactgaaatgacgtgttagttcacctttaggtcccttaactgtgatgttttcaccgtctttagtaacggtaacacctgcaggaacttcgattacttttaatccgatacgactcacgttatgacacctccttattttaagtttagattaccaaacgtatgcgagaacttcgccgccggcagccttttcacgagcttctttgtcagttacgacaccgttgcttgttgagataattgcgatgcctaagccgtttaataccttaggaacatcattagctttaacgtaattacgtaaaccaggttttgaaatccgtttcaaaccagagataacacgttcgttattcttaccatatttcaagaatacacggatgataccttgtttgtcgtcttcaatcacttcgtaatcgcggataaagccttcgcgtttcaaaatttcagaaatttcttttttcatacgtgaagcagggacttctaatgattcgtgatgtaccatgttggcattacgaatacgtgttagatagtctgcgattggatctgtcatgaccatgtggaattaacctccttattgactctttataattaccagcttgcttttttcatgcctggaatttggcccttatgagctaattcacggaggcaaacccggcaaagcttaaacttacgatatacagaatgtggacgtccacaacgttcgcaacgtgaatattcttgtgttgaaaattttgctggacgatgattctttacaactaaagattttttagccaagaaattgacctccctttttatttagcaaatggcatgccaaattgtgttaacaattcgcgtgcttcttcgtcagtatttgaagttgttacaataacaacatccaaaccacgaacgcgatctaccttatcataatcgatttcagggaagatcaattgttcgcgtacacctaatgtataattaccgcgaccatcgaatgattttgcactaacaccgtgaaaatcacgaacacgaggtaaagatacgttaactaatttatctaagaaatcgtacattctttcgccacgtaaagttactttagcgccgattggcataccttcacgtaaacggaaaccagcgattgatttcttagcttttgtgattaatggtttttgaccagcaatcaaacctaattcttcaacagctttatccaaattcttagcgtttgaaacagcatcaccaacacccatgttaagtacgatcttttcgatcttaggtacttgcatgcttgatgtgtagttgaacttttcgatcaacgctggtgtcatttctttaacatatttttcttttaaacggttagtcatgtaaaaagtgcctcctttccccaaaagattatttatcgattgattctccagttttctttgaaacgcgtactttcttaccatcaatcactttgaaacctacacgagtagcttcgttggttgatggatcaattagcataacgtttgaagcatcgatacttgcctctgtgtcaacaatcccaccattagggttttgagcatttggcttaacatgctttttaatggtattgataccttcaacaacaacacggccttctttaggcatagctttgatgattgtaccttctttacctttatctttaccactgattactttaactttatcaccagttttaacgaacattgatatacgcacctccttggttgtctgtaattatagaacttcaggcgctaaggaaacgatcttcatgaaatcactgtcacgcaattcacgtgcaactggcccgaagatacgtgttccttttggagtcttgtcatcattgatgataacagcagcgttttcgtcgaacttgatgtaagaaccgtctgcacgacgagcacctgacttagtacgaacgataacagctttgacaacttcaccttttttgacaacgccacctggtgttgcctgtttaattgttgcaacgataacatcaccgatgttagcagtcttgcgacctgaaccacccaaaactttaatagttaaaatttcgcgggcaccggagttatcagcaaccttaagacgactttctgattgaatcacttataggtcctccttccgtcacttatatatatattgagtaacgatttagataataactgctttttcaacgacatctaataaacggaaccgttttgtacgtgacaaaggacgagtttccataacacgcacaacgtcgccaacttttgcttcgttgttgtcatcttgtgcataatatttctttgaatatctaacacgtttaccatattcaggatgtgttttataagtttcaaccacgacagtaattgttttatccattttgtctgaaacaacacggccttggtacactttacgatggttacgactttcttcgctcaaagtaaatagctcctttccatttattatttgttaagttcttgttgacgtaatacagttttaatccgtgcaatgttctgacgaacttgctttaagcgggcggtattttctaattgaccggtagcttgttggaaacgaagattgaataattcttctttgtattggtgttctttttcaagcatttcagcagtggttaattcaataatatctttagccttcatttgactcgccacctacttcctcgcgttttacgatcttagttttaactggcaatttatgtgatgccaagcgtaatgcttcacgagcaacttcttcagaaacgccgccgatttcaaacatgactttttcacgttttactacagcaacccatccagcaggagcacccttacctgaacccattcgaacgccgacaccttttgcagtgtatgatttgtgagggaaaattttaatccacactttcccaccacgtttcatgtaacgagtcatggcaacacgagcagcttcgatttgacggttggtaatccaacttgattctaaagcttgtagcccgaattcaccaaaagtgacttctttgccaccttttgcagcaccgcgcatcttcccacggaattcacgacgatgttttacacgtttaggtactaacatgtttatttccctcctttcgtattgttgttggctttagcgggtaatacttcgccccgataaatccaagtcttaactcctaatttaccgtaagtagtcatggcttcgtcccatgaataatcgatgtctgcacgtagcgtatgcaaaggaacagttccttgagcatgtgtttcgacacgagacatgtcagcaccgttcaaacggccggcaacttgagttttaatacccttagcaccagcgcgcattgtacgttgcatagcttggcgttgagcgcgacggaaagcaacacgtgcttccaattgacgagcaatgccttcacctactaagtgagcgtctaaatcaggtttcttgatttccacaatgttgatgtgtactttcttacctgttaagttgtttaattctttacgtagattttctacttcagaaccgcctttaccgatgaccataccaggtttagcagtatggattgaaacgttcacgcgatttgcagcgcgttcgatttcaatagtagagacagatgcgtcagctaattttgtgttgatatatttacgaatcttaagatcttcgtgtaagaatgttgcgaaatctttttctgcataccatttagcgtcccaatcacggatgacgccaacacgaaaaccggttggattaatcttttgacccacgcgatatccctccttatgcttctttttctgatacaactacagtgatgtgacttgtacgtttgttgattggtgatgctgagcctttagcgcgaggacgaaaacgtttcaatgttggtccttcgttagcataagcttctgtaacgaccaagttttctgcatctaagtcgtaattatgttctgcattagcgatagctgatttcaaaactttgattacgactggtgaagcagctcttggtgtaaattctaagattgcaattgcttctgcaacgctcttgcctctaatcaagtcgactaccatccgtactttacgggctgccatccgaactgattttgcgctagctgttgcactagtaatttgatctgccattgagttcatcctcctttctagcgtgcttttgttttcttatcgtcatttccatgaccatggaaagttcttgttggtacgaattcacctaatttatggcctaccatatcgtctgagatgaaaacgggaacgtgtttccgtccgtcataaacagcgattgtgtagccaataaagctagggaaaattgtcgagcgacgggaccaagtcttgatgacttgtttcttttcgctatcggcttgtgcttcaatcttgttgagcaagtgtgcgtctgcgaatggtccttttttcaaactacgactcattatgaaacctccttcgaataaaaagttcaatgtgacttatgtttaagccgcattggctttagacatgttcaattggaattgattatcttgatttacgatgacgaataataagtttctctgaacgagccttactactacgagtcttcttaccaagcgtcttcttaccccatggagacataggagaaggacgaccgattggagctttaccttcaccaccaccatgaggatgatcgttagggttcattactgacccacgaactgtaggacggatacccatccaacgtttacggccagctttaccaatcttgattaattcgtgttgaccgttaccaacagtaccgatcgttgcacgacatgtaagtaggatcatacgtgtttcgccagaagttaaacgaacgatagcgtatttgccttctttacctaataattgagctgatgtaccagctgaacgaaccaattggccgcctttaccaggttttaattcgacattatggataagtgtaccatcaggaatattagctaatggtaatgcgttacctactttaatatcggcatccacaccagattcaacaaccatgcctacttcaagacctttaggggcgatgatgtatgctttgataccatctggatattggattaatgcaatatttgaagttctgtttggatcgtattcaattgacttaacagtcgctttgataccatctttgatacgtttgaagtcgatgacacggtatttttgcttatgaccgccgccacgatgacgaacagtgatatgaccatgtgcattacgaccagcagtatggctttgggattccaacaacgtcttttcaggggttgtctttgtgatctcagcaaaatctgagctggtcatattacgacgaccatttgtggttggtttgtacttaataattcccacgtgtataccctcctataattattctatttaagtgttgcttaatcttcgaaaatcttgatttcttttgaatcagcagttaaagtaacgattgctttacggcgttttttagtatagccagcatagcgaccttgacgttttaacttgccacgaacgttcatgatgtttacgtttttaacgtttacaccaaagatttcttcgattgcgtaacgcacttgtgttttgttggcacgaacatcaacatcaaatgtgtatttcttgtcgtccattgcagccattgaattttcagtaactactgggcgtaaaataacatcgcgtgcttccattatgcaagcacctcctcaattttagaaagagcagcttgagtaaggattaatttttggttgccaacaacgtctaatacgttgataccatcagcagctacaacggttacgttaggtaagttgcgagctgataatgcagcaaaatcatttccgtcttcaagtactaccaatgctttagtattaacgtctaacttgttaagtacttcagcgaattctttagtcttaggtgcgtcaaagttgaatgcatctacaacaactaaatcattgtcgataaccttttgtgaaagtactgacttgattgcaagacgacgtactttacgaggtaatttgtagctgtatgaacgaggtgtaggaccaaatacggtaccaccaccacgccattgaggtgaacggattgagccttgacgagcacgacctgtacctttttgacgccaaggtttacgaccaccaccacgaacagctgatctgttcttaacagcgtgtgttccttgtcttaatgaagcacgttgcatgatgattgcatcaaacacaacgttttcgttaggttcgatagcccagattgagtcgtttaattcaacgttcccattttggctaccatcttgtttaaataatgttacgtttgccattggtaaaatcctcccttctcagattatttgttacgagctttaacagctgttttgattgtaatcattgagtttttagcacctggcacgttacctttaacaaggataacgttcttttcaacatctgtacttacaaccacaaggttttgaacagtacgttggttgttacccatgcgtccaggtaataatttacccttgaagacacggttgataacagcacccattgaaccaggacgacggtggtaacgagaaccgtgacccataggcccacgtgattgtccgtcttttttaatgttaccttggaaaccatgacctttcgttacaccagtaacgtcaacgacgtcgccggctgcgaaagtatcaactttgatttctgttcctacttcgtaatctcctaatgcgacatctctgaattctctaatgaagcgcttaggagtagtatttgcttttgctacatgacctttagcaggtttgtttgacaagacttcgcgtttatcttcaaaaccaacttggatggcttcatagccgtctgtttcgtttgttttaacttgtaaaacaacgtttggagttgctttgataactgttacgggaattaattcgccgttttcagtaaagacttgtgtcatacctacttttctacctaagattccttttgtggtcatggtaacacctcttttctagtatttttaattggttggtacgaattaaagcttgatttcgatatctacaccacttggtaagtcaagtttcatcaatgaatcaactgtcttaggtgtagggttaacaatatcgattaaacgtttgtgtgtacgcatttcgaattgttcacgtgaatctttatgcttatgtggtgaacgaagcactgtataaagtgttctttcagttggtaatgggattgggccagagatagtagcacctgttctctttgctgtttccacaatcttgtcagctgattgatccaaaatacggtgttcgaatgctttcaaacgaatacgaatcttttgttttgccatgtttttccctccttcgtctattttaaaagtagactagctccgtgaaaatttttccggcacgcccgcccatggcaaagcggccgggtgtgtcgcaacctctcacatcttagctactcggtaatctttttgactaccatggtgcgcactcctgctatggaaatagcactttatctatcttacaagatacaacccgataacgcaacccttttttgctgatttatcaaagtttttcataacattttcataaatcttgtagcaagcgtcattcgtggatttctagccatgttttgatacactgaaagcaacttaaatcccctccaggaggtccttatcatgtcccataacgcacttttgattatcgactatacaaatgacttcgttgacccaaacggtgctctgacagccggcaaacccgctcagcaaatcgttcctgtaattatcgaattagctaaccagttcctagcagccggtgattacgtcatcttaccgactgatttacacgtcaaggatgatccatttcatccagagagcgccctattcccaccacataatctagccaatacttggggccgtgagttttacggaccactagctagctggtacaccaagcaccaaaccgatcctcacgtctatgcatttgcaaagaatcgctattcagcatttgctaacactaatctggataatttcttacgcgagcgcgagattgacgcgttaacactgactggcgtttgcaccgacatttgcgtgctccacactgcagtctcggcatacaacttaaattacccactaacaattccagccgctgctgtcgcaacttttacaccgaacgggcaagaatgggcactcgcgcattttaaaaacagcctcggagctacaattatctaatttgacttttaacgatcatctgctatcttaaatgacgggacaatgtacccattctatggattcaaactttagcagccaatattgcaacgattttcatcgtaacatccgccaatcaagaattcagcgaagcgcgcttacaacgctatttaacgatggcttgggatagcggcgcaacaccggtgattgttttgagtaaaaccgatttagtcagcgactctgagctaacaacctttcttgacgccgtcgcaagtgtgacattcgacagcgttcccgtcatcacaactggccagacggcatcaaatgttgcagcgactttcaaaccgtatttaacagctggacaatgggtgacatttgtcggctcatccggcgttggtaaatcaaccctgatcaaccagctcattaaagagccttccgttttaacgagcggcattcgcgatgacgatgataaggggcgccacacaaccaccaatcgacaagcctgtcaaactgctagcggggccttcatcgtcgatactcctggcatgcgcgaactcggcatgacaagtagcatgtctaaggcactcaagacagtctttactgatattgagacgctcgcacaggactgtcgatttaaggattgccagcatcaaagcgaacccggttgcgccgtacgagccgcaatcgatgcaggttcattaatgcctgaacggctagctgatttcaataaactggctatcgaagcggactatagtcaactatccgcccgcgaaatcgaacaagcaaaggttaaacgtctgatgggcagtttgaaaacacgtcctacaaaacaaaactaactcagtaagccgtgcctagaaacacaaaaagggagttacgacaaaagtgatttttgtcgtaactcccttttttggagaagtttatatgaaaaagagtttgagtttttttgccagggcggtggcaaatcgagttagcggggattgaacccgcatgaaccagtcttaatgatcaacaaatccttgcgccttcgaaagcaagtctctatcaatcaccagaaaaccattcactgttcttgggaggaatttcaaatgagccggttcgttttaccattaaactataactcattggcggtgctttacttagacggattctttagggaggaattgtctaatgaaaattcatttaatcttgcttttcaaggtaactttttccgcctaactacgcgaagacaacgatcaccttcgttgctcattatcctcgctatgttatgctcaaaagctaaccaccttgaaaagcatttttaccttttcagattatttcttgggaggaattcatctgatgtatacagaataccaaccagttatgaattaaatatgaactttcatttacgaaactgtaaaatcgcatttttacgcacaaaaaaaggactcgtcgcaatgacgagtccttttccaatcgaaaccaatcacttaagattagcggcttattggccaccgttcttcttgatgatttcttcttggatgctcttaggaacagctgagtagtggtcaaataccattgtaaatgtcccacgaccttgtgtagctgaacgtaatgttgtcgcataaccaaacatttctgacaatggtaccattgcattaacgatttgggcattaccacgtgcttccataccttcaacagcaccacgacgagcagttacttgtcccatgatatcgccaagatattcttcaggagcaataacttcaaccttcatgataggttcaaggatttcagcgccagcttgtttagcagcgttcttcaatgccattgatgcagcaatcttaaatgctgattcattagaatcgacatcatgataactaccatcatataacttagctttaacgtcaatcaatgggtaaccagctaagacaccgtttgccattgattctttcaagccttgttcaactgatgggatgtattcacgaggaaccacaccaccgacgatagcgtcttcgaattcgaagcctttaccttcttcgttaggtgtaaattcaacccaaacatcaccatattgacctttaccaccggattgacgaacgaatttaccttgtgcagatgcttgttttgtgaatgtttcacggtaagcaacttgaggttcaccaattttggcaaccactttaaattcacgtctcatacgatcaaccatgatatccaaatgcaattcacccatcccagaaataagcgtttcgcctgtttcattgttggtttcagccttgaatgtaggatcttcttcagcaagtttttgtaaagcaagatctaacttatcacgatcttcttttgattcaggttcaacagaaacttggataactgggtcagggaattccattgattccaagattaatggatgatcaacgtcagtcaatgaatcaccagttgttgtattcttcaaaccgattgcagcagcgatatccccagagaatacttcaggaatttcgttacggtgatttgaatgcatttgtaataaacgaccaacacgttcacgtttgtctttagttgcattcaaaatgtatgaaccagattgtaatgtaccagtataaacacggaagaatgttaaacgaccaacgaatgggtcagtagcaatcttaaatgctaaaccagcaaatggtttgtcatcgccagccatcaattcaacttctgaatcatcttctgggtttttagcgttataaggacgtacgtctaatggtgatggtaagtaatctacaacaccatccattaacatttgaacacctttatttttgaaagctgaaccagcgaaaactgggaagaatttcaaatcgatagttgcttgacgaatagcagctttcaattcatctttagaaatttcttcgccttctaaatatttgtccataatgtcgtcattaacatcagcaacagcttcaactaattcggcacgacgttttgtagcttcttcaaggtagtcagcaggtacatcaactgtatcccacttagcacctaattcatcttcatcatagatgtcagcttgcatttcgatcaaatcaataacgccttggaattcatcttcagcgccgattggcatttgaacagcatgtgcattagcttgtaaacgatcttccaatgttgtcattgagtaatcgaagttagcaccaagtttgtccatcttgttaacgaaaacaatccggggaacaccataagtagttgcttgacgccaaacattttcagtttgaggttcaacacctgattgagcatctaagacagtgattgcaccatctaaaacacgcaatgaacgttcaacttcgattgtgaaatcaacgtgtcctggtgtatcaatgatattaactcggttacctttccattcagctgttgtagcagctgatgtaattgtaatcccacgttcttgttcttgttccatccagtccatttgtgaagccccttcgtgggtttcaccgatcttatggattttaccagtgtagtacaagatacgttctgtggttgttgtcttaccagcatcaatatgagccatgataccgatattacgcgttttgtctaacggaaattcacgtttgtttgccataagtgaatattactcctctcgaatattaagctatatacaacaagaggccattatatgatttgaatacatataacagccaaccttgttaatcttaccagcgataatgtgcaaatgcgcggttggcatcagccattttatgtgtatcttcacgtttcttaactgcagcaccagtgttattggcagcatccatgatttcacgtgcaagacgttgatccatggtatgttccccacgtaggcgagcatagcttactaaccagcgtaaacctaaagttgtacgacgttctggacgaacttcaattggtacttggtagttagaaccaccgatacggcgagctttaacttcaagtactggcatgatgttgttcatagcttcttcgaacacttctaatggttcattaccagtttcttctttaataatatcaaatgcatcgtataagattgttgacgcagtaccacgtttaccatcaaccattaagcggttgattaagcgtgaaaccaatttagaattgtacattggatcaggtaaaacgtcacgttttgcaacatagccttttcttggcatcctgataacctcctcaagatatttaagtccttgaagtaacacacagtgtcatttaaacttcaatcgactttttcaaatttttttgtgtgttattttttaggtctcttagtaccatacttagaacggctttgcatacgaccgtcaacaccggcagtatctaaagcaccacggataacgtgataacgtaccccaggtaaatccttaacacggcccccacggataagaacaacactatgttcttgtaggttatgaccaataccaggaatataagctgtaacttcgattaagttagataaacgcacacgcgcatacttacgtaaagcagagttaggctttttaggtgtcatagtacccacacgagtagcaaccccacgtttttgtggtgctggattatctgtagcttttttcttcatactgttgtagccaaagtttaatgcaggtgcatcagactttgaagttcttgatttacgacccttacgtaccaattggttaattgttggcatttgaaggttcctccttccttgatctgaaagttatttttgagttttaagtccacacatccaggtggttctttttttacgataaaaaaatggcaacctagattgcgtggattgtaatgcatttttagacgtcagtcagcatgtctgaatatcagaaaacttccgtaaaaagcacatctacaagaatagcatgcacaactacgaaagtcaacgtgctataagccagtttttcagaaaaagttgcgccctttttttgtagttatcataaaggagatgacacgtttgttaatatattttttaacctttgttattggcgcgtgttgcgcctcttttttaactgtttgtgcttggcgttggccactcggtttatccatcacatggcctggttcacggtgtgacttctgccatcacgccctcgcttggtacgacttatgtccaattatcagttacctcattctcagagggcactgccgctattgtgatactcgaatccagcaccatttttttactagtgaggttattggcggcttgttagcgtgttgtttagccagtcaatatttcacaccacagattggctatttattgcttatcctttatttgttgagcctagtcgatattttccatacagctctatacccagttccaatggtactggcttttatgcctttgtttattgactactggccgacaaaccattggctcagtgccctattgattggcagcaccttatctgtcatcaactacttttcagatggcatcggtactggtgacattgaattattggcaattcttgggttgtggtttggattggaggtcaccctatccatgttattaattgcctgtctcctctgtttaatcaaatatctcattgatagtctccaccatccagttgtcctcgccttagtcggacgccgcccaattccatttgtcccgtatatcagctacggtgtcttaatcgttttgtttattgcaaacacataaaaaagggcctcaccatgtcggtgaggccctttaacgtgcaatttagagcaactgttctaaattggcactcagttattcttttgtttcttctttcatctgtgcttcgatgtcactgattgagtagacattttctgatacagcgccgactgtcttaggttccatatgacgatacttcgccataccagtaccagctgggacaatcttaccgatgataacattttctttcaaaccaagtaatggatcgctcttaccgcggatagaagcatccgttaagacacgtgttgtctcttggaatgatgcggctgataagaaactatttgtttccaatgatgctttcgtaataccaagcaagacaggacgacaagtagcaggtacgccaccgctaattaaggtttcgtggttacggtctgtaaattcactaatatccattaatgtaccaggtaagatttctgtatcacccggatccatgacacggactttacgtagcatttgacggaccataacttcaacgtgtttatcgccgatttcaacaccttgcatacggtaaactttttgaacttcatgcaagaggtagttttcagttgataagacgtcacggactttaattaattgtttaggatcaacagaaccacccgttaacttagaaccacgacgaaccatgtcgccttcgttaacgatgacgttggctgtgtaaggcacactatatgaacgtgtatctgtttcaccttgaacagtgatttcacgtgtatgttctgcagggttttcttccaccgcaacaacttcaccagttacttcagtgattgttgcaagccccttaggattacgcgcttcgaaaatttcttggatacgaggcaaaccttgagtgatatcttcaccgccggcaaccccaccggtatggaagttacgcatggttaattgcgtaccaggttcaccgattgattgagctgcgactgttccgactgcttcaccaacttcaacttcttcgccgttggccatgttacgaccgtaacattttttgcagacaccgtgttttgtgttacatgtgaagacagaacgaattgtgacttcttcaacaccggcatcaacaacagcttgagcaagttgttcatccattaattggttacgttgaaccatcacttcacccgttgttgggttaacaatggtcttcattgcgcaacgaccaacaagacggtcatacaatggttcgattaattcattaccttcgcgaattgagtgaatgagaagaccacgatcagtcccacaatcttcttcacgaatgataacgtcttgagcaacatcaactaaacgacgtgttaagtaaccagaatcggcagtcttaagcgccgtatcagtcatccctttacgggcaccatgggtagacataaacatttccatgacagagaggccttcacggaagtttgatgtaacaggaacttccatcatcccaccattaggagcagccatcaacccacgcataccagcaagttgcgtaaagttagagatgttaccacgagcaccagaatcagacatcattgagattgggtttgttggatcaaacgaatctgtgagtcgttgttggatatcgtctttagcatcgttccagatttcaataacgcgcgcatggcgttcttcatctgtaatcaacccacgacggaattgtttagaaaccgttgtgactttcttatgggcttcatcaacaatttcttgtttttcaggtaattgaggaacatcggcaaccccaactgttaaaccagcatgggtcgcttgaacgtaacctaaggtcttcatatcatccaataagtcagatgtccgttgaaccttatataccttgaagacttgcgcgatgatatcacttaagaagcctttcttaaatggtaagatcactggggcacttgagaggtagtcatgaatatcttcaccgttatcgatgaagtatttatctggcacaccattcatcaagttatctgttgttggttcgttcaaatatgggaagccagttggcatgatttcgttgaacatcactttaccaacacttgttaccataatcttgtggcgttgttcgtcagggaatggacgattatccatatcaacaactgacaaaccaatccgactgtgcaaatgaacgtgacctgtttgataagccattaaaacttcgtttgtatctttgaagatcatgccttcgccgagactacctttttgttcaagcgttaagtagtagttccctaaaacaacgtcttgagaaggtgtaacgattggtttaccatcttttggtgccaaaatatggtgagcggcaagcattaacattcttgcttctgcttgtgcttcatcagataaaggtacgtggatcgccatttgatccccatcgaaatcggcattgtaagcttcacaagctaatggatgaagacggattgacttaccatcaaccaggattggttcgaatgcttggataccaagtctatgcaatgtaggtgctcggttcaatagaactgggcgttccttgatgacatcttctaaaacatcccaaacatcgtcatcttgacgatcaattttacgttttgcatttttaatgtttgaagccatatcgcgtttcactaattcgtgcatgacgaatggtttgaacaattcaagtgccatttcacgtggtaatccacattgatagaacttcaatgtaggaccaacatcgataacggaacgaccagaataatcgacacgtttaccaagtaagttttgacggaaacgaccttgtttccctttcaacatgtgtgaaagagacttcaatggacggttaccaggtccagtaactggacggccacgacgaccattatcaatcaaagcatcaacggcttcttgtaacatccgtttttcgttttgaacgatgatgcttggtgccatcaagtctaacaaacgtttcaaacggttgttacggttgatcacacgacggtacaaatcattcaaatcagatgtggcaaaacggccaccttccaattgaaccatcggacgtaaatctggtggaataactggaatagcatccataaccatccattcagggttattccctgatttacggaaggcatctaagatgtccaaacgacggatagcacgcgttctcttttgaccttgtgctgacttcaagtcttcctttaattcagcaacttcgccttcaagatcaacgtcacgtaacaattctttgatggcttcagcacccatcttagcgttaaaacgattaccgtattcatctaatttttcacgatattcacgttcggtcatcagttgtttcttttctaaggctgtatcgcctggatcaatcacaacgtatgatgcgaagtaaataatttcttccaatgcacgagggctcatgtctaagacaagacccatccggctaggaatccctttaaagtaccagatatgtgttactggtgctgcaagttcgatatgtcccatgcgttcgcgacgcacttttgaacgtgtaacttcaacgccacaacgatcacagacaattcctttataacgaattcgtttgtacttaccacaagcacattcccaatctttcgtaggtccgaagattcgttcatcaaaaaggccatcacgttcaggttttaaagtacggtagttgattgtttctggctttttaacttcaccatacgaccaactacggattttatctgaagatgctaaaccaatttgcatactttcaaacttattgacatctatcaaagggccgacctcctcataatttatagcacgctttattcagcagatggatctactgcatcagcatttgctgcttgtgctttttcagcttcttcttgtgcctttttggcttcttgttctttagcgtatttagataatgcatcgatgttttcgatatcatcatcatcgtcgtccatatcgcgtaattcaatttcttgattatcgatatccaagaccttcatatccaagccaagtgattgtaattctttaaccaatactcggaatgattccggaacacctggttttggaattggttcacccttaacgattgcttcgtatgtcttcacacgaccaacaacgtcatcagacttgtaagttaagatttcttgtaaggtataagcggcaccgtaagcttcaagagcccaaacttccatttcaccgaaacgttggccaccaaattgagctttaccacccaatggttgttgcgtaacaagtgagtaaggtccgattgaacgtgcatggagtttatcgtcaaccatgtgggctagtttcatgtagtacatgacaccaactgacacacgtgtatcgaatggttcaccggtccgaccatcataaagaatgctcttaccatcagaaggcatgtttgcttcacgaacagcgtcccataaatctttatcttgcgcaccatcaaagactggtgttgcaacatggatgcctaagtttctagcagccatcccaagatgtaattcaagaacttgtccgatattcatacgagaaggcacacccatgggactcaataagatatcaactggggtaccatctggcatgtatggcatatcttcttcaggaacaacgattgaaacagtccctttgttaccatgacgaccagccatcttatcgccgacttggatcttacgtttttgtgtaatgtaaacacgaaccatcatgttaacacctggtgacaattcatcgccagcttcacgcgtaaagatcttaacgtcctggataatcccgccgccaccatgaggtactttcaatgatgtatcgcgaacttcgcgagccttttcaccgaaaatagcgtgcaataagcgttcttcggctgataattctgtcacacccttaggcgttaccttaccaactaaaatgtcgccatctttgacttcagcaccaacacggacaatcccgaattcgtcaagatccttcaatgaatcttcaccaacgttaggaatttcgcgtgtgatttcttcaggtccaagttttgtatcacgagcttctgattcgtattcttcaatatggattgaagtatataaatcttctttcactaaacgttctgaaagaacgatcgcatcttcgtagttatacatattccaagtcatgaaagcaatcaatgggttttgacctaaggctaattcacctttttccatagctggtccatcagcgataatttcatcaacatcaacgtgatcgccttttgcaacgattggacgttggttgtagttcttaccagcatttgaacgacggaatttcattaattcgtacgtatctaatgagctgtcttcacgacgaacgcgaatcactttcgcatcaacgtattcaacagttccggcatgttgtgctaataaagcaatccctgaatcgtgggctgctttatattccatccctgtcccaacaagtggtgcatgtgggtcaactaatggcacagcttgacgttgcatgttagcacccatcaaggcacggtttgaatcatcattttccaagaaaggaatgcaggccgtagcgacagcaactacttgcttaggcgaaacgtccatgtaatctaacttgtcgattgaagtttcaatattgtcatctttgtaacgtgctaaaacagtatcatcaacgaatgaaccatcatcgtttaatggtgagttggcttgcgcaatgacatagttatcttcttcgtcggctgttaaatagtcgatcttatcagtaacatcatgcgtatcccaactaacacggcgatatggtgtttcgatgaagccgtaacggttaacaacagcgtaactagccaaactgttaatcaaaccgatattagggccttcaggggtttcgattgggcacatacgaccataatgggtatagtgaacatctcgaacttcataaccggcacggtcacgagtcaaaccaccaggtcctaaggcagatagacgacgtttatgcgtcagttcgccaaggggattggtttgatccatgaattgtgacaattgtgatgaaccaaagaattccttaattgaggcaacaactgggcgaatattgatcaattgttgtggtgtcacggtgcttgtgtcttggattgacatccgttcacgaaccacacgttccatccgtgataaaccaattcggaattggttttgtaacaattcaccaactgaacgaatccgacgattccctaaatgatcaatatcatccgttgaaccgagaccttcttgtaagttaaagaagtagttcattgaagcgatgatatcagcaggaataacatgcttaatcttggcatcgatatgaccgttaccgattaagttgatttctttatcaggtgttttttgtgagtacactttgatcacttggagtgtcattggttctggtaagacaccttcatcagatggttggtaagtaaccgtcttgaagtcttctttgtctaagtatggtgccaaagcatccatcacttgacgatcaacaactgtatctttagcagcaatcacttcaccagtatcgggatcagcaagtgtttcagctaatgtttgacccaataaacgcgtctttaagcttaatttcttgttgatcttgtaacgaccaacagcagctaaatcataacgtttagcatcgaagaaacgtgcataaagtaatgaacgtgagctatcagctgtcttcggttcgcctgggcgaagtctttcgtagacatccttcaaagcttcttctgttcttgagtcgtcagtattcttatggatatctttttctaacgtcaacattaatgaatcgttgtcgcctaagatatcgataatttcttgatcagaaccgtaacctaaagcacgaactaaaacagacattggaatcttacgtgtccgatcgattcgaacatatgcaatatccttggcatctgtttcaaattctaaccatgcaccccggttaggaatgacagttgtaccataagttgtgcggctgtttttatcaacagcgctgttgaaataaacgcctggtgaacgaactaattgagaaacaattacccgttcagcaccgttgatgatgaaagtcccttggtcagtcatcaatgggaagtccccaaagaaaacgtcttgagatttaatttcaccagtttcatggtttgttaatttcaaagtaacgtgtaatggtgctgagtagttggcatcatgttgtctagcttcttcaaccgtgtatttaggttcaagaagttggtaatcaacgaattctaatgataagttaccagcaaaatcgtcaattggcataatgtcatcaaacatttcacgaagcccttcgtctaaaaaccattgataggaattagattggatctcgatcaagtttggtagttctagcacttctttaatccgtgcgtagcttctacgagtacgatgtttaccgtaattcactaagtgtcctgccaaattgttcacccctctataagttttccgcagcctcattgttacaaaaatatgacaaatgttaagaaaatattacatcgccattttttggtaattttgagcagaaaaaaaacaaaaacagttattttaagctgaataaatcagactaactatttttgtttttcatgaataccgtgctggacaatagatcagcacaataaatttttctacggattttcgcagttactgtataatatacttcttttactactaaaagtcaataatctgcctcggtgctacttatcatagataaattgattattataaaatttagatttggcgctcaaggccttatcaacctttttcaatcccttttcttctattaatgtctttttcgttgaaaatagattagttcctaagcctaaacgttctcctttaatatcaacccccattgcggcgagcgtcgttgggaacatgtccattgtgctaaactggcgattcttggtttgaacctgacttgcttttggtgcatttaaaatcaaattaaatgcatgccgtttattggccggaatcttcttataatactccacatccatgcctaaatggtctccgttgacaatgatggtcgtattctgataaaacgactgcgtttgtgcccacttaataaattcaacaatttgatgatcagaaaaggcgataacgtttgaatactggtcaccatacttttctggcatattcggttctggatacccaccaatgtggtgcgtattctccgttagcatcgttaagttaaatggctgatctgatttgctaagctccaacgcactttccttagcgtattcgaataactttgaatcttcatagccccaccaaacataatagtcttcaggtaaccgaccatctttacgcgcagttaacaaatcatcaatttgaacattaccgtgctgcgtaaaatatgatcgtcgaccaccaaaagtcgcatccgatccaagcaagattttttgctgatagccgtgcttgtccaaaatattatttaatgacgtgacgcctggtaggaaatgattctttttatctgtcgcataggaattcccatccaccggcactttcaacggtaatcctgatgtttgggcgaccattcccgcaactgtccagcctgttcctggtaattgttgggcaccaccaaatgatcggttagaatttgagaagtgaacaccctcttgctcagctaacgccgtcaattctggtagtaaattggttttcatctgcccacccatttctcttgatgttgctgtagattcgagtgactcagcataaatataaattagatttcgtttttgttttgggaacgttaatttggttttattcggtgctacataattttcttcaataaatggtgaattcgccgttagatattcgtaaaaaccaacagcatcaattttaatcgcagcaaccgtcgtcaaaccacaaaacaataacgcactgaccaatacaaatcgttttgccttgagttctaagtggtgtgttattttatgagtgaccaacagttgcaagtgtctgatatagttgcagaacaaaaaaacgctgattaaacaagtaatggcacctagcaccggaccgccgataaatgaattaataaaaccatcgtcaacacctgtcatcggttggcgtaagttataaactatctgctcgggcgttaacaagccaaaatttgcctttgtccaaaaactagctgacaacaagaaatacccaactgatattaataaggcaccactaaaaatccaccagctaaaccaatgtcttgtgcgtgtgactggtaccagttcaaatgttaaccatttttggcgccaccttcttgtcaccaacacgacgccttgaataatggtaatcaacataataaacttgagtaaaaataacttttggaacaaaccatcactaaaatgaataacatgaccagtcaacccaaaagtcactaaaatcgttaatcctaatacaagcaccaaattgatcaacataccaactaattgaataaattggcgatcattgcgttggacaatagcacataaaaaaggtaaacagacaaacaagtagatcatcgcaataaataacattatgtatttgctccatttctaactatctcatttaatcatagcattttatggctgtatcgcctacccacccttttaacaaaagtctctaatgacaatcttcaagcccctcacggaatcatttacaaactcgcgacttatcatttacgttttttacacgaattagcggtcaatctttacacgacgtctctatactgaacttgtacccttaaatcagtcctcaggaggaatcattatgaaacgcattagtatggcattactcacagttggcgcggccgctcttttattagctggttgtcaaggccaatcaaaaagtgcaagtcaaagccaggatcaaggcgctaaaattactgcagttggttcgacagcccttcaaccccttgttgagcaagctggcgatcaatatcaaaaggataaccctaaagtcaacgtcaccgttcaaggtggcggttcaggaactggtttaacccaaattagtggtggcaacgtcacaatcggtaactcggacatcttcgctgaagaaaaagatggtatcgatgctaagaaacttgttgatcacaaagttgctgtggttgcaatcgcacccgttgttaataaaaagttaggcatcaaaaatttaaccagtgcacaattgctaggcatctttaaaggcgaaatcacaaactggcaatccgttggtggtcctaacgaaaaaatcaccgttatcaaccgggcccaaggaagtgggacacgtcaaacgtttgaaaaattaggtcttaaaaccgacaaagttgttaccagccaagaacaagattcctctgggactgttcaaaaaatcgtcgaacaaacgccaggcgctatcagttacctcgccttcccatacattaaaggtaacttgcaagccgttaagttaaacgacgttgagcctaccgaaaagaacgtttcaaccaatgcatggccaatctggtcttacgaacatatgtatactaagggcgcacctaactatcaaacagcccgtttcatccacttcatccaatcaaaagacgttcaaaagacaatcgtccctaaactgggctacatcccaatgacgcaaatgaaagttgagcgccacgttgatggcaccatccaagatcaatagtttccagaagtcgcgctaaactgcgcgactttttaattggtatatactaataaaaagcttttaaacaaagtaatttgcatttatatttatgattggtataatcgaactattagtttatcaaaggagtttggcgaatgattaacaataaaatgaaaacgttatccgaaaaataccccactaaaatggcaattacttccgaaatcatcaacttaaaggccatcttgaacctccccaaacccactgaagccttcatgagtgatttacatggcgaatatgatgccttccagcatctcattcgcactggcgcagggaatctccggcaaaaaattgcagaggtcttttccggtgaaatgactgaagacacaatgcaggcgttcgcttttttagtttactacccaaccgagcggcttgcactcaaacacgcacaactatctgctagcgaactcgatcagtggtacctcaccacttttaaacggttaatcgacctcttaaaatttgtctccacaaaatacacacgctcaaaagtccgtaaagcaatggcgcccgatttcgtctacattaccgaagaattaatgtacggcgatgtagctaacagcgataagaaacgctacttccaagaaatcacgacgtccatcatttcgatgggccaagccgatgccttaattatcgccaccagtcatacgattcaacgactagtggttgatcattggcatatcatcggtgacatttacgatcgtgggccgtgtcccgatctgattgtcgaacaactcaccaagctccccgcggttgatattcagtggggcaatcatgatattctctggttcggcgccgctagcggttctcaactatgtatgctcaaccttttacgcatttgcgcacgctacaataatttagccatcatcgagaaagcttacggaattgaccttagcgaactggttcagtttgcccaacgaacttatcagcccaatcccgccttcgaaccaaaggttgctgccaatcaacacgcaatctcaacagctgaaaagaaaagcatcaaccaagtgcaccaagccatcgccatcatgcagtttaagttggaacaaaccgtgattaaacgcaatcctgatttcaaaatggaccaccgcttaaccctcagccatgttgactttgaacagcagacaattcatctaaatggtcataactatccacttgataacacctgctttcaaacagtcgaccccacacacccagaaatattaacttccgatgaagcagccattgttacatcattgctaaacacgtttacccactgccaaaaactacgcaagcatctccgttttttaatcgacaacggtaacatgtaccaactctacaaccagaacctcctttttcacggctgtattccagttgatgaagccggcaacttcctcacgctaaccctcgctaaccgacaatacgctggtaaatcattactcgacttcttcgatcaccaaattcgaacgagcttcgaccacccgctcaatcaagataatttatccaccgatttactctggtacctgtggacaggaccgctctccccactatttggcaagaatgcgatgacgaccttcgaacgctacttcagcgccgaccccgttttacacgaagaaaagaagaacgcatattaccaactccgccatcaggaagacttcattgagaaactcttgttggagtttggcttaacgccagaaaccgggcacattctcaatggtcacacacctgtcaaaaaaggccacaatccaatcatggctaatcgcaaaatgatcgtgattgatggcggcttttcaaaagcttatcaccacacaactggcattggtggctttacgctcttgtacaattcgtatggaatgcagttagtcacccatcagccgttcaccacacgggccaatgcaattgccaagatgcaagacattatttccacgcgtcgagtgattgatcaagttagtcaacgtcaacgtgtcagtcagacgaatatcggcgctgcgattaaaactgaaattgaacagctcacgacccttttaggacaaaaaaaataaggtgtcagaccaattggtctgacaccttatttacgtttaaacagttactttatcagtcttactggtaatggtaattttacctttagttgcgccaattgtcaccggtacacccatcgtaatctcaccagcgagcaacgcttcactcaactgatcttctacttgggtttgtagcgcccgtcgaattggtcgtgccccatattcaggatcgaacccagctttggcaacaacatccatcgctgcagctgtcatcttgatttgaatcccttgttccgctaaacggcccaagacattcttcgccataatcttcacgatttcgcgcaattcaggttgtgttaaggaatggaagacaaccgtttcgtcaattcggtttaagaattctggacggaaagctttcttcaattcttccataatgcgcccttgcattgctttataatcagcagttacatctttaaccccgaacccaacggatttatcatcacgtaaggctgtcgcacctaagtttgatgtcataatcatgatcgtattacggaaatcaaccttacgtccttttgaatcggttaaatagccgtcatccaagacttgcaacaagatattgaagatatcagggtgggccttttcaacttcatcaaataaaatgacggaatatggtttattgcggaccttttctgttaattggccgccttcttcgtagccgacatagccaggggccgccccaactaaacggctcgtgctgtaacgttccatatattcagacatatcaacccgaatcaagttgtcttcagaaccaaacatagcttccgccaatgctttggctaactctgtcttaccaaccccggttgggcctaagaacataaatgaaccaattggtcgttttggatctttcaaaccactgcgcgcacgacgaattgcacgtgaaacggcagaaatggcttcttcttggccaacaacccgtttatgcaagactttttcaagttgcatgagacgttcgctttctttgcgttgcaactgagtaacaggcacaccggtccattgcgcaaccacttgagcgatgtcttcagcagtcacttgaatgtcactgcgaacaccgttttcttgttcggcagcttgtaacttggcaatcttggccttagtggttacttcttgctcatgaatcgtcgccgctttttcaaaatcttgcgcgcgaacagcggcttctttatcgtcatttaaagtttgtagtttttgttctaatttatccgacggtgtcttctggttaacagcatccaagcgcactttagccgtcgcttcatccattaaatcgattgccttatccggtaagaatcggttcgtgatgtagcgatttgataagacaaccgcttcatgtaaagcttcatctgaaattgcaatcccatgatgagcttcataacgtggacgtaatccctttaagatttgttccgcatcttctggcgttggttcattgaccgtgacggtcgcgaatcgccgctctaaagctgcatctttttcaatgtacttttgatattcatctaaagtcgtcgcaccaattaattgtaattcaccacgcgctaatgctggtttcaagagattagaagcatcaattgccccttcagcgccacctgcaccaatgagggtgtgtaattcatcaataaagagaatcacttgcccatctgcatagatttcatcgataatcttcttcaaacgatcttcgaattcaccacgatactttgtcccagcaaccaatgaccccatgtcgagcatcatgagccgcttttgctgcatgtcacttggtacatcgccattgacgatgcgttgcgcaaaaccttcagcaatcgctgtcttaccgacaccaggttcaccaactaagacgggattattcttcgaacgccgggctaaaatctgcacaagtcgccgaacttcttcatcacgacccacgaccggatcaatttgattgtcacgagcaagttgtgttaaatcgcgcgctaattggttcaacgttggtgtcccagcttgatcggcattattcttagctgctttagcccgttttttagcggttgccgtatccacacccatcttttgaagtagtagttggcgtgttttagctaaactaagtcctaagttcaacaagatccgcgcagcgataatatcatcatcacgtaaaagtgctaataataggtgtgctgtgccaattttaaccgaattagcttgttgcgcttcaacccgagcaatatcgagtacttgtttggctttgggcgaatatggtaaataaccgccaatgccagaagcgattacagcatcgccatatccggttaagcgttcaatttcttcaaggacatcggtcgaattgacacctaattcgcgtaaagtagtcccagcaattccctcattttctaatacgattgctaataggagatgttccgttcctagtgcatggtgattaaatttctttgcttgttcttgtgccatcattaagacgttttttgcacttggtgtaaatagattattcatggataatcccccactctttacttaatttcatatcgtagtcgttctaacactgcaactagaatctgtgctcgaagctgctcttctaattgtttattattaaccgctaatgtctgtggactcgttgccgcgagtatcaaattgccttccttttgcgaaagaatttgttcatcatatagtttctggataatggctaaggtgtccgcctgggaaatctgcgtatcaacattttcaattaacgcttctaaaaagtcccgatcatcgagaaattgaaccttgacgatccgaatataaccaccgccgccacgtttactattcacgacataaccgcgctgctcagtgaaccgcgtgttaatcacatagttaatttgggacggcacacaattaaaaagcttagcaatttcggagcgtctaatttcgatttgttcattgtcagccagtatcttttttagataggcttcaataatatccgagatgttctgactttgcaaacatatcagccccttcatttagtcttctgcgtttttcagtgtcaaaagtttaactttgactaacgttgactattattataacgattatcagtacaaaatgaaagtttactgacttttagtagctaatcaattggacgcacaaaaaaagacttgtcatcaacaagtctttgagagtcgggaaaacaagatttgaacttgcgacccctacgtcccgaacgtagtgctctaccaagctgagctacttcccggaaactattttattacgggtacaaaaaaagcggaagacgggattcgaacccgcgacccccaccatggcaaggtgatgttctaccactgaactacttccgcattttttattaacatttttgtatccagcattgcaacaatccttaaaaattttgcaatctaatagtctcgacctactggattatttaaaagctcgtagtttagagaaccccttgtttgaggtcgggtccgtcgaagcctgtacaaaagaattcaattttgatcagctagcggctcacggaacaggtaatttatacgattatttgttggaacaagtcggttatcggtttaaagcaggtaaattacagcaacttttgcaacggctgattttggaggttgaaccaaatggctatttaaaggtggatgaagcccgttttatccaagaaaatcaaattgatcagaccacttatcaagacgttgtgacgttactacaacaacttgatccaatcggggttggtggtcgtgatgcacaagaagtgttattactacaggcctctgctatttatccggctgatgatcttagtattttggtgataactgattattttgaacaattattagctggtgatattaaacaaattcaaactcagttagccattagtcaagatgacatgcaatcgattttacacaaaataggtgcactgagtcttgaaccaggaaatatgtttgatgactcaccaactaattttcaagtgccagatgtcattattaagatgaatggctcacgatatcagctactattgactgaatttgggcgaccaacgctgatttttgaacatgcaagttacgcgcagttccaaaaagaagtcgatgtcgctaccaaacaatacattcagcaaaaatatgccgagtatcagatgttaaacacgagtttgcataagcgcgggcaaacattattaatggttgctgaagtcctaatcaaggcacagtgggattatattactggaaaacaagcatatcctaatcaattgattctacgggatatcgcaaatcaattgcagctcagtgaatcaacaattagccgaacgattaaagaaaaatcaattcggacgcctaatggtatctatcttctgcggaatttgttgaccaaacggagtacaactttagaggaaggtcccaccttgacacagacgcacattgcaattcaaacagttgttaaggaagaagaagcccatcatccattgtctgatcaaaaaatcgcggaccagttaaaagttaagtatgacattaaagttgctagaagaaccgtcgctaaatatcgtcaagaattaggtattgctaataaggcagaccgtaaataagcaaaaaagcaatggatgcagttaatattactgtatccattgctttttaggttcttataaaattgccatcagtttaaaccagtccaatacaagtgggacccactgagctgctacagtattagcatattctggtttgcctggtgtttgagtcacatgattagcaagcgaaaggccatgaacaccagctccaaagagatggtattcaacagggattttatgttgctgtaatgcaagtgtatatagaagtgaattcgttgctggaacaagggcgtctgtggctgtttgccaaataaaagctggtttagctgctgctgtgatatttttttgtgcgtgccataaagtttggtccactgtaatctgttgcttagttgcatcatcaattggaaaaccagcgtcaaaatcaatcacaggataatttaagacaatcgctgcatgatgaccacggtaatcgtctaacccgtaatcagctcggtggattggatcggtcgcaatgccattataggtagcgaccacatgtccaccagctgaaaaaccagtcaaaacaattcgatccaaatcaatatcatattctccagcttgatcagtcacccactcaattgtcttagcaagctgatgtaaagcgagcggataaacggtttcagtcgaacttattaattggtaggggagaacaatcacgtgaaacccttctgctaaaaatcgcaacgcgaccggtgttgtttcacgacctgaatgatacgtaaaaccaccgcctggacaaataatcatgacgggatgtttaactggatgctcgaaatctggaatgggtgttaaccaatatgcatcaactataaatgcttgttctttaacggataacgtttgacgttcgatcgacattattaaggacctctttctattatattaaccgttttcaatctatgttaatcttaccggataatgacaaaaaataacagtattaagcatgactttttgatactaaccatttaaaaatctcattaagtaaagtatgatagttttagaggaaaacgtaatgatatcaggttatacagctctttacggcttggttgcgcatccagcgcaccatagcttgtcacccatgattcataatctgggttttaaacaacatcaaatcgacgcgcggtatctggttttcgatagccaagcacggccgcaagatgtcgcaaaagcgattcggacgcttggtgtggcaggcgttaatctttcaatgccctataaacagtcgcttgtgccattaatggacgagttaatgccaactgcgcaactcgttggcgccatcaatacggttgctttacgatcgggtaaattggtaggcacgaatactgatggcgatggtttttggcgcgctttgcagaaaagatatcccaatctagctagtcagcagattgttattctgggtggtgggggcgctgctctcgcggttatcgaagccgccgctcgctatggtgtggcgacgattcaggtcttcaaacgtcaaaatacgacttatgcggtggttgaacaacgactggcaaaaattgctaatcaccattcgatgtccatcgtgctacataattatgccgatgaacaggcactccaacaagcactcagtaatgctgattgcgtgattaacgccacgaatcttggcatggtcaatacccctggattaccgctggcagcacctttaattggtcaaataccgatgacttgtttagttgccgacttaatatatgcgccacgtcagactgcttttttacagttagcggctcgaagtggtcatccaacccaaaacgggcttggcatgttagttgaacaggccgcgttgagttttcaattctggacgggccaggtcctacaaaccgatcccatctatcatgctttaacgaaggagttttaataatttatgattattcaatttaaaccaaatactgattcagcgctgattgatgatttttgcgcacgacaacgcacgacaaatccgaatgtctatcagattaagcaccatgtagcggtgatcggtgcaaaagcaattgattttacccaagcagaggaagaagtcattgcggcaaccaccacggatgaaccgagttacgtgcttggcagtcggctattccaacccgaaaacacggtcatcgaattagcacacagtacgattggcggtgcagacttcacggtgatggcgggtccttgttcggtcgaatctgctgaccacattatggcgatggccaaagttgctaaagaaggcggtgcgactattttgcggggtggcgcgtataaaccgcggacatcaccgtattcctttcaagggatgggcgaagctggtttgaaagcattgcgcaaggctgctgatgcttatcaaatggacgttgtgaccgaagtgatggatgaaacgcatgttgatttagtggcgcaatataccgatatttttcaaatcggggcgcgcaatatgcaaaacttttcattattgaaagctgttggaaaaaccaacgttcccgttgctttaaaacgtggcttagcagcaactgttgatgatttattaaatgctgccgagtacattgctgccaacggtaatcaacaaattatgctgttagagcgcgggattcggacgtttgacaatcactatacgcgcaacacatttgatttaaatgctgtcccagttttacaaaaattaacgcactatccagtcttaattgatccgagtcatgcgactggtgaatgggatcttgtgacgccaatggctcgggctggagtcgcaactggggcaagtgggttacaagttgagattcatgatcatccagaaaaagccttttctgatggcgcacaagccttaaagccagctacttatcttgaaatgtgtcatcaagtgtgggccgttgatgcagtcgtcaaacagtggcggcactaatggtgataattgatgtccacctcacacaaaaaaattatcagattcggatccaatctggtttgtatcacatctgtgctgaacaaatcgcgcaagtttggacacctcgtcaaatcgcattaatcacagacacgaatgttgccccgttgtatttagaaacggtcgaatctcaattaatccaagttggctatcaagtcacaccgattattattccggctggtgaaacgtcgaaatcacttgaccaagcaatggcactttattcccaactggcagcggcgaattttacccgtcatgacggggtgattgctttaggtggtggggttgtcggtgatttggcggggtttatcgcgtccacctatatgcgggggattgcatttattcagatgccaacctcgcttttggcacaagttgacagtagtgtcggtggaaagactgcacttgatttaccagctggcaagaacttagttggttctttttaccagccggatttagtattgattgatcccgactttttaacgtcgctgggtcaacgccaattactggccggttatgcggaaatcgttaaagtggctgcactcaacggtgggacattttggcaacaggtgacagggattcaaagtgcgcatatgattctagcgcaggctgaaacactaattcagcaaagtgtgcactacaaggcacagattgtcatggccgatgaaaaagaaagtaatcaacgccaattattaaattacggtcatacgattggccacgcggttgaaaccctggccaatggcagcctgatgcacggtgaagcggtcagcatcgggttagttgccatgcagcacttagtcgaacaaagtggactgactgaagcgcatttaacaccagtgattacaactgttttaaatgcggtcggcttgccgacagatagcccgttacttatgagtgatcgactcttcacgcaacttttacatgataagaagaatcaaggagatgccattaatcttgtttacctcgatgcaattggtgttccaaaaattcaatccataccgctaacgactttagcggctaatctattttcaaaaaaaaactggtaaccaacccacagataccttacaatgaaactaacttgtaaagagtgtttaactgaccgtatgtgcggagcagtcttggaaccaacaatatatttgaaatagaaccataggggttgattgactagatgcaactgattttaatcggttttatggggtctggtaaaacgaccattgcacgcaaagttgcacatcattaccattgtgactggattgatttggatcgctacatcatgcaagaacagcaaatgacgattaacgaaatctttgccgaaaaagggcaggctgcatttcgacaaatggaatttgaggccttacagacattgatccaacacgatgggattatcgcaaccggcggcggggtcgtggatgatgctcagacgcgccatttacttgaacagagtcatatccccatttttttcctaaatgggagttatgaagcacattggcgccgcgtttcgcgcaatgatcggcggccacttgtgaatcaattgggccacgatggtttacgcgaactgtatcacaaacgacgaccaaagtattatcggcttgcggactacaccatttttttccaacataagacaccgaacatgatgttggcagaaatcgatacgcagctacccaggattcaaaaaaagttggctaataaacattagtcagcttttttcaatggtcgtagaatcatattattcgctttttaacgccatagacttgtatgatgaggttataacaaggagggtgaacaatgacatttaaattaccagcactaccttatgaatatgtggccttagagccgtatatcgattctgaaacaatgcatctgcatcatgacaaacatcataagacttatgtaacaaaactcaacgcggcgctagccaagcaccccgatttagcaggtaaatcattacatgatttgttaacacacatcgatgatttacctgagaatcttcaaacacctgtccgcaataatgctgggggccatgccaatcatagtttcttctggcgaattctaacaccgaatgcgccagaagcaccaacgggggaattactcgaacggattgaagcccgctttgggaagtttaagacgttccaagaagcattcaccgaagctgcccttggtgtatttggctctggctgggcatggcttgttatcgatcaaaatggtgaactacaaatcatgacaacgcctaatcaagattcaccacttatgagtcgtaatcgaccactacttggacttgacgtttgggaacatgcgtactacctgaaataccagaataaccggattgattacatcgaaaacttttggaagatgatcaattggccattggtagcggaattactttaataagggtgttcattataatacatttataactgaataaaataagacccatcacttaataagtggtgggtcttattttattttacacaattgtaaacactgtcatcacaattatagagcgatttattcttaaatgtaatagttgtagttatcattattgacatttttaatattaatggaataattatagaaatcattagggttttttaatagacaattttcagcagtccatgctaatctgaatatgttataaaaataataatacttttaggggatgagactatcaagaatgtaatcggaattttagcgttaggaatcctaacaactagcaccatcagttctatacaaacagttaaggctgaaccaagtgacaatcaccaaaatttagcgagtagcgtgctagcagatagcctcaaatccaagggaggcaccagcaaactctaaaagcaccacaagaaatgaaaacctatattggtcgtggtgatgtttttaaagaaaaagaccggcaacgcagaacattacgctactcaagtttagagcctagcggtttatacgcccaaaaaggggatgttttgacagttgctcaggggatgcaagattcattatctatcacaattggttcgcccgaacgagaaactcaaaaacaatatccattaacaaagggcattacaacgattaccgttgaaaacgagggcccgatttatgtgactaatcctaatgattctggtgaagcaacaatcacaatatcaggggcaacaggatcaatgccatatttcgatttaaatcaaactagcgtcgcagactttgagaaacaaatggcggaaatgacgaatgctaaagatgtgcagttggtcagtaacaaagcattaattacagttagttacgcaatggctaaaaaatatctcggtgaccctaaagaactgatgacttattatgatcggtttttaacggcacaagatcgggtttcaggcattactactgaaggaaatccagtaaactttgttgatcgccatctccaacatttcttagagtcacctaagttgtatatgtatacagaaaatgaatttatgggcttccataatgatcgcgctttgcaacgactactgaagacaaatgaaggttggggcatctggcatgaaagtggtcatcagagacaacaaacaccttggaaatggggtgctgttgtagaatcaagtgttaacatttatgcattagcggctcaaaaagaattgactggtaaaataacatcgttagatcaatactacccagaaatgcatacttatctaaaatctgataataagcaattcaacgcacaaaataataatttaaagatggttatgtttggtcaattaggaaatacatttggtgataacttttaccccgttttacatcaatactatcgtgaaaacaagcttgcatttggaccagacaatgaacggatgcaaaactttgttctaaatgtttctagaattacgggttataatatgcagccttatttcgaacaatggggatttgatatttccgcagcagttaaagctgaaattagtcaattagcacctttaccagaagctatttggttaaatgataaagaaactaataaacagttacccatgcgcttaatcgacaccgtatcgctgaatgaccacggtattcaagttaacctgactgactaccaaaccgatgtatttaaggatgagcaattaatccttaaaaagaatggacaagtgatttccaaactcgtcaataaagagccaattgaaagtatgttaacaaataatgtttgggaaacaatcgagatgcttaaaccgactgatgtgattacaattgaacagcaaaataaaaatggtacttttaaatgatatgaacactcaattgatagtattgcacttgaagaagagttattaaactatttgaatgcatcagaaccgattggtacaattctaacccaagctaaactagatgctctccgaaatcgaattgatgctcttccttctacttttgactataaagaaagactcttagaactatttacaaaattagaagacaaatacctagctacattagtcaaagatattcaactggattcacaatcagcattagtggtatcgtttactgatgagaagtttaaagactatgcgaaaattaaggtacttgttgacgaccaaccagttgcagaggtcaaaaatggtatcagtagtggtggtcagctcgacgataatgtcttaacaattcctaaccaagcggatgcacatgttgttaccgtagtggctgaattaccgcacaagtcttacattctaaaaatgattagtcaggatattcttcttctgaaacgtcaagttgaagcgttatttgaaacaaacgatcagttgaaacctgaggtcacacaagacctattagattaattacgaacacaaattaacgcagttaagggctcggaaaagacgatattgactcaaagaattaaccatgcacagcaactgttcttgaacactttagttgctgacatgagtgttaaaaataataaaatcgtcgttacctttgctaacgaattatttaagcattataagatagtcgtattaggaaacaacagctatctggcagaagtcaccaatggccaaaactactatggttccctaaatggaaatgtatttactccttctaaatcagttgtccatggacatccttatcgggtagaagttagacacgcaagtggaacttacaagattagagagatgattgctgagtaaataaaatggtcccacatcaaaatacgatgtgggaccatttttatctataaattactatccgttgtaaagttgagtggtgataggttcgcgctatccgtaatcagttttgcggtgaggcgttccatttcgtgttgggcaagttgcgcagcttttgcagagcccttggtcatcaacatcgttcgttggaccgcatcggtttcagcagcaaccgcttgatcggttgttacgatattttgaaccattaagctattgatgtgtttttgcgtttgttccaagtccttggcgaacttggcgtagtgtgcatccaccaaaataccagctaatttataggtccagtagatcgaatcttgactgtaatcctttgtccctttttggtaattgactgggacgtcattggcacccgcatagaatggtacgtagacactttgtgccgtgacacccattgataaccagtgaagcccgctgacatcgaccggtaagttagggcgcatttggagaatgtgtgattcttgcgtctttgctaaactaattgggcggaaagcatgtttttcttgtggtgtgccgtgaccgattggatcgtagaccgtgccttcataatgcgagcctagaattcgcgcgacatcttcgacttgaatgggcgcatcggcttgccgtaagaaggggaggttaaagtcttgaggttgttgtgcgacagatggcgttaacaatttttgaccgtaccaaacgcgcggtgtgttgtaaacaaggtcgctttggtctttggtcccaaagatatcgcggaagttaaatggcgtatcagcttgccataggtgattatcacgcacaaaatcttgaatcccgtctgaagtcatgaaccaatccggttgatcgaattgcacttcttgaatcgcgagttgattggcaaccacggcatagctatcatccggaatccgttgggcaacccagtgatgtccactgccgatttcaagataccagacctcatcgacatcggaaaagagaatcccgttactttcagtggtgccgtattcactaacgatggcgcctagccgcgcaacaccttcacgggccgttttcacgtaaggtaagacgactgtaatcatggattcttcagcaatcccgttgtcgatgtaggggtcaaagccgagaacgcgactgttgctataagcactttcggtgccgctcatcgcaacgccgtattcgttaatgccgtcttcttcgaatagtccatattcatcggtccattcgggtgtcgccgtgtattttgcggcttcaagtggtaaatcgattgaaaaacccgtgtcttttgagacaaagtgcggggcagtcgttaacttttgatggggatggatggttaaatgtttaggccaagctgcctggctatcttcgttacgtgcgattaaagttgagccgtctgcagtggctttcttaccaactaaaacactggtacaggccgtcaattgacggtaaaggggttcactcattgtaatgcctccatagataaatcaatattagctattattatacattcttttgcttaaaaacacagtaattaccgttgctcaattgcgttaaaacaggcataatataagtattcaattaaaggaggcaccacacatgccattagtacacatcgatttaatcgctggccggagccaagcacaattaaaacaactctgtgcagacgtcacagaagcaatcactaaaaacacaggcgcacctgcagaacacgtgcacgttgtcctaaacgaaatgcaaccagaccactactcagtaggcggcgtgctaaagagcgacgaaaaatagagtgcgacgtcagatggtcatacgctgaggattagtctaataccgtgaatgagcggcgtagccgatcgtttgcggtatgtaactaaccggaagtgtatatctgacggagcacgtttcagaatagagtgtgcaataagccgggtatcttctgaggattagcctaatcaggcagattaccgacaaaatcggtgatttgacggatgtagctaagcacagaaagttagcttgaaaagcacgtttcatccatcaaaaaaagcgattcgaccagaaattgtcgaatcgctttttcattaatccatcttaaaatattgccgtaaataattggccacaccatcttgcgcattcgtcagtggtgtgatgttgtctgcaatcgccttgatcggtgcaattgcgttttgcatcgcaaccccggtaccggcataggctaacatatccaaatcattactttcatcaccaaaggcaatgatatctgattgatcaatgtcgtagtgtgccgctagttttgcgaggccggttgctttgtgaatcccatgatgcacaatttctaagacgctagcaggaccaccccaagtgttgacggaaacgtcagggaattggcgcagaatttcagcacgtaacgcatcttgatcagcgcgttccacaaaaaccgtgacggccgctgggtcttgccgaagcgattcgcgggttaaaatttcatcggacttcaacgttgtggggaagaaagaaaacgtgttggcataagcttgatcagctaaaaacatcgttttaccttcggcggcaatcatttgaatcttaaagcgttcttttagttggaagagactaaagacaatgtctttattaatcgtatattgatattcaccggcccaggcttgtcccggaatgtgcattaaagccccattaaagttaaccattggcgacgttaaacctaattgttggtagaaaggttcactcaaacgatttgggcgccctgtgacaatactgacaatgtggccagcgttttgtaattcagttaaagtttgttgcgttttaagtgtaatttgggcatctgaattgagggtagtcccatctaaatccagtgcaatcaatttttgatgcatagcggcgcctccttttaaaaacgtgtttggttaaaacacgatatgtctttttattctagggggtatgcggattgttgtcaatgatcgtcagttgtaactggtcggttgaaccagtataatagagctattagagtgaccaggaggcaggacacatggcagaccaaccacaagatgatgcagcaattgaagacttaaaggaacggattctagccgcgctcgagaccgtgattgatccagaactcgggattgacattgtgaatctcggcttggtttacggtttaaacctggatgaaaatggcttatgtacgattgatatgacccttacaacgatgggctgtcccttaaccgatgttttaacggattcgattcatcaagcaatgggcaaaattccagaagtcaatgaagttaaagtcaatctcgtctggtacccagcgtgggataccagcaagatgtcccgttatgcacgcattgcactcgggattcgttaaaacgttcgatttggccttccgattgggaaggtttttctaatcgtctaagagaaacttatattagaaacggaatccattatgatacagttaagttatccagagaaattgcgccagagtcaacgtttttttgcaaccgtcccagccattcaagtacaaattcatgctgttttaactagtttattgcagattgaacaggacggcttgcccatacataatttacccgttttgggaattgatgaatctctgtatttagaaatattactccaggttgaacagggggcttttagcgccgctagtgtggctgaggttcaacgtcagttacagttaatcgaccacttactgcgcaattaccgtgaatatttgcaaaatcgctttggcatgtgggcctatatcactacagatttgacggcggcgattgtccgcgagtttcccaattggcgttttctagaagtcatggctggtaacggctatttaagtgctggtttacggcaggcaggcgctgatgtgatttgtaccgatagtttagcctggactgccgagaatgaaacagggcgccaattagtcacgtcagtggcagctcttgacgccaaacaagcggtccaaaaatatggtccgcaagtcgatgcagtcttaatgtcctggtcacccaacggcgtcccagttgattatgaattgctgcaacaacttcgtgcaatgccaaatgcccccattttgttgtgcttaggcgaacgttttggcgccacgaatagtcacgccttttggacggcggcccattatcacaacgacgcccgtttatcacggattaaccgttacttacgcccattcgatttaatgcgtgatcggttttactggattcaatagtctgctttaaaggagggcccactgtgcgcctgaaaaaaataatattagattgtttactagttggtttaacagttctaggcatgttaacgattagccaacgtgcaaaaactaactatagccaacgcttaaatcacaatagtttatcagaaaatgctgtgatttttaattctaagagtcaacagtcgattcaaaaaaccattcaaaaaattgatgccgcgaaattaagccattttcaaattcaattcaacgttgattcccggttctcatatgtctatgcgaaagggaagttatcgagtgtcccattaaaagacggccggttcttctccagttacgatttcaaatcacagattccagtcgtcgttgctggtcaatcacgacttgctgaactctacaaaccagctagtcaagcgtattatcaagatcatggtcgctacttatccgtgattggcgttgtcggtacgaatcagacaactacgcttgatcagcacatttttgtatccacgtcaccagaatttgtattaaatgatcgcccactgaataaagtcaccgtattggttgatggtccgcagatgggagcgcatctgaaaacttaccaaaagattttcaaaacgactaagcacagttatttaacaccgaagacgacgccgttagtcggcgtcaactggctccgtcaaaatgcgggtgtaatcgcggtaattgccgtcctcatgatcatcgcggtcggtttcacttatttatttagccaagttatcaatggttatcacgcacaaaaagggctcagcactggtttatatcgtaaattccgcgtggcacaaacccaaatttttgcgctgcacctagttgttagctcaatcattggcttctcaattggtagttggttcttttacctaacgggtcgaacagcgatttttattggattgatgatcattgatctcatcttaatcggtatcttttattatttaattccaaaaggacgaaaaacaacacattaaaaaaacggtttagtcattagattgactaaaccgtttttttttaagggttaaactttacgccgtggttcaataaaaacagcgcatgcgccactgataaatacaagactgaatagagttgtaaaccaatctcgaactgctgttaagcggtctggcacaaaagtcataaataaaatcatcgataataaacacgctgcaaacatcgttttaaaaacgcgatacataataagctgtgagcgttcatccgaacgtccaattctagttataccatagtagaaaaacagaattgaaatgatgattaatccgattgccacaccagcgattacatgggcattttgatttaaaaagtgtagcagggccatattgttacgcctcccgataagtgaatagaacgtcaattggtacatcaaaaaatcgtgcgagcttaaaggctaaaatcaaactaggtgagtagttgcctttttccattgcatagatggtttgcttggaaacaccaaccgcttgacctaatttttcttgagaaagatgttggagtactcggtattcatagactttattttcgacataattcgtttctttcaatatgcaccacttcattatcaaagtttacttatacttttaacaactatatttttacattatccaagttaatttgtcaagtgctttagcgaatatccaaatttaggcattactgcaaattacagtatccaacatcctgttgtgcaacctgattataataagttccccaagttgccattgcgttaatcatgggactcagtgtttgaccaaattcagagagttggtattcagtctttaacggccggagactaatcaccattttagtaatcacatgatccgcaattaattcttccagctgtagggctaacatgcggcgcgaacaatcgggtaaagcgcgcgtcaaatcaccaaaatggagatttgaatgttgcaaaagttgataaataatcacacttttccatttacccgagataatttgaagcgtgctttcaaccgggcagcccgcctgacaatcataaatgtgccgttcttgaaccatgaaatggcctcctttgataccgccattatagtccgctagcagtcatttgcctagtgaaaacaatgtaactagttacattcgatatacgattgttacggggcaattaatgttttagactaatggtgaataagaaagaaggcatttttaatgcaagcaattggttttaccaaacatttaccgattacaaatgaagaaagtttaatggcttttaatctccccagtcccaaaccaaaaccacacgatttatgcgtacaagtgaccgctgtttcagttaaccctgtagatgttggcgttcgaaaagggggtagaggacaatcaaaaacgccccgtattcttggctgggacgctgttgggattgtcacaggaattggcaatgccgtcacgttatttaaaccgggtgatcgtgtcttttatgttggggactttaaacgaccaggtagtaatagcgaatatcaattagtggatgaacgaatcgtcgcaaaagcaccgcagaatttaacggacgcgcaagctgccgcgatgccgctcacagcgctgacggcttgggaagctttatttgagaaattacacattgattttgaagatcgaaccactaatcatgatcaaaccatcctaatcattaatggggcaggtggggttggttcgatcgccacccaactggcacatttggccggattgcacgtgattgcgactgcctcccgtccggaaacgcaaaagtgggcgctggcccatggtgcggatcaagtcgttaaccatcatcaatcactcattgaacaggtgcacgcactcggctatcaaacggtcgattatatattagagttgaataacatcgatcaacactgggagagtatggcgcgcctgattaagcccaatggccgcatcgcttcaatcactgaaaatcatcgcccggtcgatttacaaaaattaactaaaaaacgggtcgagttcgcttgggagtgggttttctcaaagacctactatcaaacaacggatttagcgagtcaaggcattatcttaggacagattgcaaccttattggaacaaaacaaattgcaatcaaccctgacaaagtgcttaagcccaatttcagcagccaacttacggcaagcgcatcaactggtcgaaacgaaccaaatgattggcaaagtcgtagttgctaattaagcaatcaaataaagcccggtagaagaaatccttctaccgggcttttgctgcttaaaatgttatgtgccgttcattcaaataatgccgtaattcaggcgagagaataattggcgccttttggagcgcttgaatatcgcgtgcgccaagcattgccataatctcttgaatctgcgcttgccaagtgagcaagttttccgccatttgtgtcgggccttcttttaaaaccatgtgcaagaattgaccggaaatcccaacagcactggcaccaagccgaagtgctttaatgatatctaggggattccgaatcccacctgaagcgaggatgttgacgtcattttggaaagcgcgtgattcaaagagcgattcgaccgttgattggccccaatcagctaagtaatcgtaggctttatcatgacgccgttcgttttcgatcgtgacaaagttggtcccgccacggccagaaacatcgatgaattgtacaccgatttgcttgagttgcgcaatcgtatcagcactcatcccaaaaccaacttctttcacgataacgggcacaccaacattggcgacaatgttagcaatctcgtctaaccagtagaaatcttgatcaccttcaggcatgacaatttcttgtggcgtgttgacgtgaatttctagggcattggcttgggtcattgcgacggcttgcttagacacattcaaatcattaccagcaccaatattagcgagtacaaacccgtggggattgaattcgcgaatcacgctaaatgtatccgctagtgacggatctttaatggctaccgattgggagccagttgccattggtaggttggtaatttgggcgacttgcgctaattgtgcgttaattttctttgtctgctgactaccaccggtcatgccgttgatataaaagggactggcccagttagtcccggcaaaatcggtactgatatccacgtcggataccgcaatttcgggtaagctttgatggataaaccgaatgccatcaaagtcattgatggcatcaccatggcggaatttttccgctaaaaagacatgttcatctttccgatgagattgaatggattgtttgggtctgaccatgggtaagctcctaatctacgaggtgaactgcaaggttcaatcgttcaatttgattggcccgccattgttcaaagagggcctctgtttcgatagcgcgatcaataatgacaatcccacaatcaccaccgccagcaccagatgttttggcagcaccgccgattgtctcggctaatgcgcccattttctgtaatattggcgtttcaatagcgacgtgactgaagtgagcgagatcttgtaaaatggcacgattgtggcgtaattcagcttggatctgggctaaatcattacgacgaaacccttcgaccatcgcttctaagcaagctttgctagctgcgaggaagttttgataatcggcttgccgttctgttttagcaagggcaattttatccaccaagtgcgaggttgaagcgggcgaccccgtccaaccaatcaagagtgacaactctgctggcggtgttaataattcgattgaaagactaggccatggcatttcgagcagctccgttagactaacagttggtcgaatgtcagcaagccattgtttatcaaatgaccgataagcgacccagccaccaaaaacactagcagcaatgtcgcctaaagaaccgttgccctgcacatctaaatgcgcaatagcagcaagtttatacaattggtcgtttgatagtgataattcataaaaggcgcagagcgcttttaccgttgcaacggttacggcggctgaactgcctaaaccgtattttttaccatcagcagagtctaaatcactatttacccgtaggtggtagacgcgcagtgtcttacccgcttgacgtgcgtattgttccgttaagcgaatcgcggacaaaatataatggaagggattatcgcggttatcaaaaaccatttcatcaccttgtcgttgccaataaagggaattttcttggtattgtttagacacaatactcccatattcatgactctcttcaattgtgactgtcacaaattgatttaaagccacgataatagccggaaaacctgtttctactactgcgtattcgccagcaatatacagctttccgggcgctttagccgttatcaaaccatcagaacctttcacgtttaacttaaatttgcattatcgatagctcacaccaggacctggtttagcaacaaggagttgttcaggactaaaatagggcgcaagcgccgctaaaatctgaggtgtttcctgactggtacaaatcactttcacgtttggaccagcatccatagtataatagcaagaaacaccctgttggcgcaaggtctgcacgactttaattgcttgtagggtttcaggttcaaaataggtgaaaggtgggacggcactaagggttgtcgcatgcatctgcatcgcactttgttctgctaattgccccaccaaatttatatctttcttaacgattgcggccttcattgccggaattgcggcttgagcggtttcaacccatgctgggtagtagggcgacgtggccaccgtattcgccatcccagcacgactggcgatggctttttgacgatcatttaagacaatcgcaatcatctggatgtcccaatcaactgtttcttgaacgggaacagcgtatgaatccaaatcattggtcccacgttgccattccacaaaaccaccataaatcgagcgggttgcagagccagaaccacggcgggctaatctcgaaagatcccgatcgttaagttcaagcccagctgcacgactacctgcagcagctaatgccgcataaccggaagcagaagaggccaacccagcagcattggggacatgattaatggtttccacagcagcaaataaaggcagatgcgcctgttttcgaattaaatcgagaaactgactcatctgcgtactagttttggtatccgcaatggcaccattaaagctaatttggtcagcagtcaaatcagttgaaaagcggaccgttgtatctgtataaaaatgatctagcgtcattgaaagactactgttatacggaataatcaattccggattttgttttccccaatacttaatgagcgcaatattcgtatgtgctctggctgtaattgattgtcccatagtaatactcctaattttttttaaagtgcgtgtagtggttgaatccaagttttgatggcaccagctgctgataaggcttgtgccaaatcatccgcagcactttgcgtagcggccagggcgataatgcagccaccacggccaccacccgttaacttagtgcccaaactaccggtctgattagccacatcaatcaaatgatcaacacgggcattgctgacaccgagtgcccgcaaatcaagttgagcacggttgaggttcgcgccaagtaccgttaattcgttttgggcaatatttcttgcgacttgttgcgttagataacccaaatggtcaattaagggttgcgtttgttctggattggacatcatttgattctgaacgcttttgacggcggcacctgtttgccccttttgaccgctgtcggcgattacaagatacccttttaaattaatgggtaggggttgaagcggctgccctttgacaaaccataatggtgtagttgcgccggttgtcgcggcgtcaatcccgcttggattaccgtggattaaattttcggagagcgtggctagctttagtagccgttgttgactgagctcttgatgataagtcgcaaataacgctcgaatgatggcgacggccgttgcggctgaagaacccatcccgcgttcgggcggtaagtcactttcaatcgtcaattcaaacggggttaagttcggatctaatgcatgccacagttgttcaattaaccggcgaatgccttgcatctgaccaacagcctgttctagaggaccattgtaataagtactcttaatttgcggtgtctggagtgccggctcgagagttaccgttacccgcgcttgaaccgcaaagatggggagggcaatcgcaggttgtccataaacgacagcgtgttccccaattaaaataattttcgcatgactttggccaacaccagtctgcatacaatcacccttaatctctttttctgacttgaagatacccttactactatactgcaaaacaaaaatgatcgccacataaatcaaattgggcacaggttaatgggtttcctattatacccgctttttaccaacggactagccggattttatcccaatcacttgtctatctatggtaaaatgacgccaaaggagtgtgggcgccatgagcttaaaatttattattggtacagctagttatgaccaccatcaaacactagtcaagcaactacaaacagaccttaaggccaccaacacggaccgctttttttatttggtcccgaatcatatcaaatttgaatctgaagtcgcacttttaaatgacctaaaaacccctggaagtgagtatgtcgcaacctcacgcgtccaagtcttctcattaagtcgattagcttggtatttcatgaaaaataccccgtactaccagattccgcggatttcaaccgccgggttaaacatccttgtctaccgcctcttgcaagaacatgcagaagaactcagcttatttggtggggaagtcaatcaaacaggctttgttgctcaattaacgagccaactattggaacttaaagtgggctgtattacacccgatgagctaactgagattgcggcccagctagcgcccgaagaagtcgaactgactactaaattgcgggaaataaccattattgccacggcgtttgaagccgctatgcaaaagcaattcatcgaaaatacgacgttaattgatgccttaactgattatttaaaaaaacaagacttacacgattgtcatttctatatcgaaggtttcgcacaattcacggctcaagaacaagcgctagtcgccgtcttaatgcagcaagcaagcttaaccgtagccttaattaccgactatgttaattaccaacaaccaccggaaaaactcagcttcttttatcaagctgagcgtacgtattatcaattataccaacaggccaagcaaaatcacattcccatcatgactgatcagattgccactaaccagcgggtttcaccaacgttactcgcgcttgatcggtactgggttgcttctgaaaaccacggtcagatcccaacagcaccggaaatcgattcgacgcaacttcaagtgatcggtgccgaaaatcggtataccgaattacggtatgttgcccgtgaaattcgtcgtttagtccaaaccggccactatcgctaccgagacttcttgattatgactcggcatttagccccttatgaaacaatgattgcgccgatttttacagaatacgaagtgccgtacttctgcgatttaccggaaacaatggcggcccatccacttgttgcgatgttggcagcgttgtttgatgtgaaagagcattactaccgctatgaagatgtaatggcgcttttgaagacggagcttttaataccagatgactatcaatcagtcgctgaattccgggctgatcttgatttgtgtgaaaatctgattttaaaaagtgggtatgaagggcatgattggttaagcgcagccgattggcaatattatcggttcggttccttccaagatggtgttcgaacaacagaagatgaagtgctcacggaacggatcaatcggattcggcattatgttcaatccgtattaccaccattttataaacggttagacagtgccaaaacagggcgcgatgccgctaaagtgctctatcaattcttaatcgaacaaggtgtcgatcgacaattgttaaattggcgggaccaagcactcgcagccaatcaaattgccttagctggccaaccggaacagacatggcaaacatttatgacgatgttggatgaatatgtgacgttattaggcgaccaacctttcgaactaaagggcttttgggatttactagcggccgggtttaatacggcgcaatatgcgcaaattccatcgacactcgaccaggtcgttttatctgaatcagggatggtgcagactaaacgccgcaaaattacctttatgattggtgcgaccgatcaagtgatgcctgatcagattgaaaccagcgccttattatccgaccatgatcggcaactattaaccgatcggttcaattcagaacaattcttaactgatccaagtgccagtcagatgagctttgaaccttatctgaactacttggcctttttaagtggtactgaaggattgtatttcacttatccattgaataatggggaaggggcgaactacacggtatccccctatgtcgaccggattaaaaactacttccatttaaccgagcaacgcgttctagcagaagtcattccgacaagtacagcgccaattacgggttcttggcgtagtttgttaagcgatttgattcaagttgcgcgacaagcacaagcgacgcaaacactaattcctgaccaatggcagactgtttatcgtttattacaacaatttcctgttagtcactacttaaccaatcaactccttcaaagtctggcgtaccataaccaacccgttgcactgacaagcgatattgtcactgggttatatggcaatgaaatccatacgtcgatctcgaaattagaagagttctatcaaaatcaatacgcttatttcttaaaatacggcttaaaactgaacgagcgcccaatttttgaactgacacctgcaaataccggtgatttctaccaccaagtcttagatcaatttatcaagatgattcaagcccaacgcttagtcttacccgatctcgataatcaacaaatcgatgcattgacggatgaaatcttacaaaaagcgtatgaacaaccagaatttaagatcctcaataaatcagcacgaatgggctacattcgccaacaattgagtcaaacaattaaacgcgtcagccggacattgcgcgatcagagtcaacgaacgaacttaaaaccgttggcaaccgaagtcttattcggccaagttggtgcccaacaaggattagctggtctagaattcgaattacccaatcaacgtcgggttaaggtgcgggggaaaattgaccggatcgatcaactgacattaaacgaccaagcctacctgggaattgttgattacaaatccagtcaacacagctttagcttccgcgatgcatactatggtttggcattgcaaatgttgacataccttgaaactgtcttgcaagatcaagcagcaattttaccagcgcaaagcaaggtaaaaccagccggggccttttatctgcaccttcaaaacccaacaatgtcattgaagcaactgaacaaacaaaaactcgctcaactacaaaaaggcgaactcgatcaattattactggatcaatttaagtatgatggcttaattttaaacgatgagaccttactcgaaaacttggatacagctttagaaagtggctattcaccactgtttaacttcaatcgtccaaagagtggggcattcaaatcgaaacaactggtcacccttgatgagttacagcaattaattgcccataacgatcaactaatcaaagcagcgggggaagcgatttttgctggcgaaaatgctttgaatccgattatgcggcccgaccgcacgaatgcactcacaatgtcgccatataaatcgattttccaattcgatgcgatgttaccagaaaataattatcgccaattaagtgcgcttgataatcaagccgtcttagccaaaattatgaactcggaggaagaacgacatgagtgatcgccgatttacaccaacccaacaagcagccgttgatcacgcggggcatgatatcctcgtttctgcctcggcgggctccgggaagacaaccgttttagttgaacgcgtgattcaaaaaatcttgaatggcactgatgtggattcactattggtggtgacgtttaccgaagccgccgcatccgaaatgcgccaacggattcaaacggcactgcgaaaaaaagcaagcgaggcaaccgacaaagcggtgcaacaacgcttacggcagcaactcagcctagtcccgaccgcacaaatcagcacgttgcatgcgttttgcttacaagtcattaaacatttctactacgtgattaagttagatcccgcgtttcggttattaagtgatactgcggaacgtctcttattagaggatcaagtttggcaacgcgttcgcgaagaacattaccagtcaaacgacgccttattttatgatttagcgcaaaatttttcgaacgatcgcaacgatgatgggctaaccaacattgttttcgaactgtttaacttctctggtgccaatccagcgcccgatgaatggttacaatctctaaccgccccttacgaggtaccagagactggcctaacaaccagtgcttatttcaaaacaacgattctgccaaagttagaagcgaccttggcaacctgtttaaaagacttggcactcgccaacgaactaagtcaaacaaacgagaaatttgcggtatacttgccaactatcgcaacggcacaagcagcactaactgccattcaagccaacgcggccactttaagttgggcgcagtggcgcacacaattgaccgacgcccaattgggacccgccaaacgaactaagaaattagaacccgatgaacaatatgacaaggaccggatcaaaaacgccctcgataatgtcaaaggggcactaaacgatcttttaacaacctattttgtctttgacgaagcacaaaccagtcagattcaacggcgcgctggtgagttagtcggtaagttagtgacggttacccgcgattttaagcaagccttccaagctgagaagaaacgccgctatttactagattttggcgatttagaacatttctgtttggatattttggccggtgacactccggaatcagaggcagcacgaacgttctatcaaaataaattcagtgaaatcctggttgatgaatatcaagatacaaaccagttacaagaaacaatcattcaaactatcgctagtcaagcaccccgcaacgtcttcatggtgggggatgttaaacaatccatctatgcctttcgattagctgatccgagtttgttcctcggtaagtacgacgaattcaccaagccagataacgatagtgaacgcattattctcgcagaaaacttccgttcacggcgtaatatcgatgatttcgtcaacttagtctttaaacaaatcatggaccgccaattagggcagctagattacgatcacaacgctgaattgcaatatggtgcgacttattatcctgacgatcaaccaactcagccaactgaattacttttatacgaaacaaaaccgactgatgaagaatcaacgggcaagcttgataaagctgaaggtcagattgcatcagttgcacagcgaattaaacgaatgattgataatcaagaaaccatctgggatcgggatacgcaagaaatccggccaattcgctatcaagatattgtcttattgacgccaacgcgcaacaacaacctaatcattcttgattatttccaacggttcggcttaccgattgtcattagtgatgcgcagaattatttccaaacaacggaaattcaaatcatgctatctttcttgaaaattattgataatcccaatcaagatattccactggttagcgtgcttcggtcaccaattgtcggtatgaacgaaaatgaactcgcattaatccggattaatgataaaacggatgactattaccaagccgtttttaattatcttgatcagttcgaagcacaaaaatccggccaactcggccaacaagtcttcgaaaaattaacgcatttccaaaccttattaaatgagttacgagccattgcacgtcaacggccactcgttgatttaatctggacaatttaccaaaagaccggctttttagattacgccggtgggatgccagcaggtcgccaacgccaagcaaacttgcacgcactctatgaacgcgctgcgacttacgaagcaaacggctttaaagggctcttccagttcatccaatttatcgaacgtttgcaaaaacaagataaggatttagcccaaccaaccagtctcgccaatcaagatgccatctctgtgatgacgattcatgggagtaaaggcttagaattcccggtggtctttctaatggatgccaatcatcaatttaacgagcaagacttgcgccaaaattacgtgctcgatgatcaatcgggactcggaattgtttacttagacgcgaaaaaacggttaaagattccaacactaccagaattaaccatcacgacccaaaaacggcaaaagttacgcgctgaagaaatgcgaaaactctatgttgctttaacgcgtgccgagcaacggctgattatcgcgggcagttgtgataaccaagcgaaactatttgcaacttggcaaaaagggcagcaaaatcctgatctgcggttggacgcttctgttcgtcaagctagcacgaacttactagattggattggattgagcttaattcgtcatccgcaagcccgtgattggaccgaagaggggacaccattcctacctctgagcgatgacgcaactgaatttaatttaacgtttacaagtgaaacgcgccttggcgaattaccaggtgttttacaccatgatcaagattggagccagcaacaacaagtggcactcaaggcggtcgatttaacaactgatttagccaacgggattcaagaccagctaacattcagttatccagcaaaaggcgccaccgaaacgacagcttaccagtctgtttcagaagtgaaacggctctttgaagatcccgacaatgatcagttggggcaattacgctttgacgctgatacaccgcaacaaacccatcgttacgtgaccgatgaattacctcaaccacaattcatgcagactgttcgaaaagcgagtccggctgaaattggaacggcgacgcatctggtcttacaagaaatcgatttaacccaaccagtaacgatcgatcgggtgcaaagtgtcatcgaccgacttgttttacaaaaaagcctcactgccaatgttgcacaacaaattaaagttgctgctatcatgacattcttcgagagcgagttgggtcagcaactgttagctgaaccagcgcaagttcatcgggaagtcccattttcactattgttaccggctgcatccttattcgccggtttacgcccagaagatcaagacaatgtcttaatccatgggattatggatggttatgtaaccacggataccgactgtattttgttcgactataagactgattttgtgaacccagctgatccagaagctgccattgaggcgattaaagcgcggtatgccggccaaattaacctatacagtgccgcgttgacgcaaattgctaaccggccggtaaccgctaaatatctctatctattgtcgattggccaactagtcgctattaactagactggtttctacgcgtcattcatagtatgattgatataataatgagtaaagtattggtgacagcatgaaccaagagacaatttatgccgtcgttgatttagaaacgactggcacaaacattaaagaaggggaccgcattattcaattcggatgcgccctcattcaaaacggcaaaatcattcagacgatttcgcaagatgttaatccgcttcgcgacgtaccgactaaaattcaacatttgacgcatatcactgctgatcaactcgaattagcaccgattttcgaagatttagcgccaacgttagttgaactcttatccggtactgttttcgtggcccataatattaactttgacttaccttttttaaatggcgaattagaacgcgtggggcaaccgccacttgatttgccgggcatcgatactgttgaactggctcagatcgtattgccggaagcaccgagctatcgattacaagacctcacacagttactcgccatcgaacatgacaatcctcatcaagctgacagcgatgccttggtaacggctaaattattcttaaaattaatggcacggctgaagaccctgccattagttaccctagaacgtcttagtgcgttaggcgcgggcttgttacgtcaaacaggggatttcttcacagcgattgccgagcagatgcatgcgcaatcgagaccgctgccgaacgatctcttaattcgtgaaaacattgccctacgaaaaccagccgaggaatcatttgaaatctatccgggatctaattttgcggctgattatccagtggaagaagctgataaaaaacgattattaaaaccccacttgaaatggcgtaaagcgcaagctgccatgatggatatgattcacgataatttcgaatctgaggcacctgaaccactattaattgaagcagccaccgggttagggaagaccatcgggtatttactcccctatagttatcgcatgacgcctgaacacaaattagtggttgcaacatcgacaacgctgctacaggatcagattttaacgcaggccagaccgcttcttaaaaaattagtaggtcgccaaattaatgccgaaatcgttaagagtccgcgtcactatttggatttgcatcgctttgaattatcgctccgtttaccacataagaatcggatggtgcggttgcttcagatgaaaatcttagtttggctaacccaaacaacaacgggggatttggatgaactcaatttaacgagttaccaaacaccatttttcaataacgtgcaacaccggggattaacaagtctgcaaccacaagcgccgttttatcaagatgatttcttacgtcgcctgcataagcgccagcaacaagccgaattactcgtcaccaaccacgcctacctggcagagcacgcgaatgatcaccaaacctggggtgcgcgaccatacttggtcttagatgaagcacaaaatatgattttcaatgttcaaaaaattgcgcaacaagattggtcactttcacgttggcaactttggtctcaaaaagggttgcaatatacggatccggaacaggccaataataatttagcccggcttttcccgaaaaaatcatcgcaagcacgctcgttacggttagtgcataaaaacttaaccaagttaggccgaaccatcagtgacttagagacatacctaaccacagcgtttgaactaccgcaaccagaagcgcatcaagcgtttagtgaacgttatttgaattcagatgaagtggttcaatttgtcaccgcttgtcataatcaattcgaccaactgaaccgccaactgttgaccattcaagatcattttctcgcgttgcgttactggcttgaacagcggttagaacaatatacagagggggatttggggatttggcagtcatttgaaaacgaaatcaacctattgttggcggatgttgaagcctatcaacggtttgagcaattattcattgcgacgaaaccgcaggaacaacacgcgttaatgattcagatgacacagcctaaacaacctagtcagttaccacagtttaagctccagtggcaattgctttcagctggtccgcaaatgcaacagatcctcgcgcactttgaaccagtcaccttgactggcgcaacccttgcggttaatgggcacttcgattatttgaaacgtgaacttggttttaccgaagcgcaaccactagcgactaagaaattacgcagtccattccgcttcaagcaacaggcgcgcttttttatcgctgaagatggtcctagtcaaaagaatttagcccccaatgagtaccatcatgcagttgctgaacagctattaacgttattagttggcaatccgcatcaggcgttagtcctctttaattctaatcaggcgttagaacaagtgtattatgcgcttggccgcgccggtttatcgcttgatcgtgagattcttgcccaagggattacgggtagtgcggagaaaattaccaagcgctttatgctggggcacgattcaatcttgttggcgacaagcagtttcattgctggtgttgattttccggaatcagcactggaattagtggtgcttgttcaattaccatttgatgcgccgaatgcactgcagacacgaattcgttacgctcaactttctgcccaaggaattaatccatttaaagcagaggctttaccaaaagcaacgattaaactacgccaagcatttgggcgcttaatcagaacccctaacgatcgcggcgtcttcatttgtttagatccccggttattatcgacccaatatgggcaacaaatgcgccgcgcgttaccgacaagtttgccccaaaaagcagcgtcggttaaaataatccgggaattaaccgacttgttttggttaaattcccactaagattcggttttaagcgccgatagccgttattttttgctataataaggcttattcaagcgaacaaggagagaatgcagcgtgcgcaaatataagagatggctctggatattcttattgttggtaatcattggcagcatgctgatgatttatcatcaagctcgaaaacccgaagcaacggctgaaaccaaagccgttaacattgctaaaaaatacgcgaaattaaaagagcctgatgggttctacacgtatcatcgaaatgcaacatattataccgttagtggtaaagaccgtgataatcacggcatcttcgttttaatcaacgaaaaaggcaatcatgccactgtctatcgtcaaagtggtggtatttctaaaaacgatgcgttagaaaagacatggtcaactaaaaatccgcaaaaagtactgaacattaacttcggtatgtaccgcaacaagcctgtttgggaagttgtctataaaagtgacaaaggccgtctttgttatttaaccctcgattttaaaaccgggaagacgattcaattgattgaaaatatctagggttctcaattagggggctgtggttgtcagggttttgttatataataataactatcagttattttgaactgttgtaaattaaatgttgcacataaggagacagagtttatggttaaaaaaatcagtattatcgatgcaaaaaaccatgtcgatgaagaagttaaaattggcgtttggttaaccgacaaacgttcaagtgggaagatttcattcctccaattacgtgatggcactgcctttttccaaggggttgtcgttaaaagccaagtaagcgaagccgttttccaattggcaaaagatgtcaaacaagaatcaagtatgtgggtgacaggggtcattcatgaagatactcgttcacactttggttatgaaattgaaatttctgacatcgaattaattggtgacagcagcgaatacccaattacacctaaagaacatgggattgaattcttattagatcaccgtcacttatggttacgttcaaaacgcccatttgcgatcatgaaaatcagaaatgaaatcatccgcgcttcttatgaattctttaaccaagaaggcttcatcaagatggatccaccaatcttgacgggtagtgcccctgaagggacaactgaattattccacatcgaatatttcgacaacgatgcttatttaacacaaagtggtcagttatacgctgaagctggcgcaatggcctttggcaaagtcttcacttttggccctgttttccgtgctgaaaaatccaaaactcgtcgtcatttgactgagttctggatgattgaaccagaaatggccttcacaactcaagatgaaagtcttgaagtccaagaaaaatacgtggcttaccttgttcaaaacgtcattgatcactgtgcctatgaattaaaattattggaccgtgatgttgaccaattgaagaaatatactaaaacaccgtatccacgtatttcatacgataaggctgttgaaatgttacaagcagctgacttcgatattaaatggggcgatgattttggcgcaccagatgaaacttatttatcggatcaatttgaacaaccagtcttcattttgaattatccaaaagccatcaaacctttctatatgaagccacatccaacacgtgatgatgtttacttatgtgctgatttattggcaccagaaggttatggtgaaattatcggtggtagtgaacgtgaaactgactttgataaattagaagctgaaattaaagcaatgggcttagaccttgaagaatatcaatggtacttagacttacgtcgttacggatcagtgccacattctggtttcggattaggtctagaacgggccattacatggatctgtggtatcgatcatttacgtgaaacaattccattcccaagaatgattaacagaatcaaaccataaagagtgctgactcgaacgagttgactttgaggattaacagcaaaacgggcattatggcgcttcacagccatggtgcccgttttacagttaaccggaaaaggcagttcgaagaagcacgtttcaaatagagtgcgttgtagctggttaggttctgagcattaacgttggttggcgaataatcgatgcaatcgattatttgacaatcattgttaagcgcaggaacctagctacaaaagcacgtttgaattagagtgcgttgaaagtggttagttctcgagcatttgtctagtctagtgaatgagcgacgcaagtcgatcgtttgctggacgtagcaaagcaccgaggactactttcaaaagcatgtttcaaatcagagtgctgactcaaacgagttggctttgaggattaactaaagcgccgtgaaccgaaatcaggttctcggcgcttttttatttgtctaaaattggttacaatagaactaatgaaacttttagaaaagaaggctagaatatgaacgaacttaccgcgtttttacaaggcggccaattgagtgtctctcgactgttactgcatcactatcaaacgctcaagatgtcttctgaagaattagtggtttacttacagctcagtgattttgccagtcaaaacaatgactttcccgatttagctgtgattggtgaacgcatgggaattgaatccagccaaatttacgcattgattcatcaacttttacagaaaaaactaattacccttaaatcatctgtcaatgaacaaggtaaggctgaagaccattacgatctcacaccagccttaactaaattgagcgtgctagccgttcaagacgcacaagtcactcaacaagcactagacggtaaccaacggagtgcggtctttaaccaagttgaacaagctcttggccgcccattatcgccattggaatctgagattgttgccaactggttagatttagatcattatcaaccagaattgattcaattagccgtgcgagaatccgttttaaatcaagtctattccttgaagtacgttgataagatcttgctcaactggcagaaacaaaatattactgataaagaatccctacaagcttaccaaaaggcccatccaagacgttaatcgaataggagatgaagcggatgttatcaaaagccaaaacacagtgggccatgcaccaactatacaatttaattccagatgcgcagggcgcattagttgctgattcaccgtttcaattgttgattgcggtgatgcttagcgcacaagccaccgacgtttccgtcaataaggtcaccccacaactatttgctgatttcccgacaccagctagtttcgcgaatgcagagattgccgatattgaagctgatattcattcaatcgggttatatcataataaagctaaacacattaaaacatgctgccaacaactaatggcagattttggtggggaagtgccgcgcacacatgccgaattggaacaacttgctggtgttggccgtaagaccgcgaatgtcgttttaggtgacgcctttaacgtcccatcatttgccgtcgatacgcatgtcactcggattgccaaacggctcaaaatcagtgcacaggatgcctcggtgatccagattgaaaaggactttcaagcgaagcttcctaagaaaacatgggttcaagcgcaccacacactcattctttttgggcggcaagtctgtacggcacgtaagccgcattgcgatgagtgtcccttattaaggatttgccaagcaggccaacaatttcttgaagatcgtggttaaaaaacgcaaaaaaagcaccgttcagccaacgtttatcgttgaactgaacggtgcttcttttagttagttggcgctgctggtgtttgtgtcgtcgaccccgttcctggatgttgttgccggaggggttgaggtcgaaggttgcgattgtgaactttcagttggggtgcttgaagatgaggtctccggcacactggaagattcacttggtgtttcaaccacgctacttgagctagaaatttcactgcttgagctgaccggtgcttctgagctagagtagagtacactacttgaagaagatcgactgcttgaagaacttggaatggtcgtcgtccctttaatatagagttctcgtacgccagccacgtttttagcaaccacgttacttggcattgaccaatctgagttggttgcgttttgagcgaggtaggccatcattgctttatagatataagcggcgacgttccgctcacccattgttaatccatttttaagtggttcatcgtatccagtccaaaccgtcactgaatagttcttggtataaccggcaaaccagctatccttcgctaaagttgggtttaacccagatttggcaatttcttcgctagaataatcggttgtcccagtcttaccagcttgatgaagccctggaatttgggctaacgtcccagaaccatttttaataacatcttttaacatatcagtaatcatgtaggccgttgaactcttcatagcctgtgtgccatcagaatcataattatgcgtaatcccatcggctgtttcgactttatggatataagttggtgcatagtaagttccaccgtttgcgaaggcgccatatgcggcagcttcatcaacagttgaaacattcccaccaatcccataagaaagaccagtatcagctggcacgttaatgcctaagcctttcacgaattcacgggctttagtcatgccaacagcttctaacagttcgatggctgggacgtttcgtgagttggcaagcgcattacgcgcggtaattgtaccgagataacggccatcaaagttatgcaattgaatattggttccaggataagtgtaagggacatcttgtagtttctgtgcggttgagtagtcaagatattcgatagctggaccgtaatccattaatggtttcattgatgacccattacttcggccagattgcacggcccggttataaccgagctgcacatcaccagttttacgaccaccaatcatcgcaacaattcgaccgttattaggatctgtaattgaaactgctgtttgtagctgatcatctgggaatggaatactgctatcattattgacgatatcgtataacttacgttgcgcgtccatattgatattggtgtagactttcaaaccagccgtgtacggatcatagccttttttcttcaagtcggcgaggacttccttgacgtaagcgtcggttgctttagaatccgttgaactattcgctactgtttgttgatccactaagccggtattaattgggacttgtttagcttcggcagcttcagttgctgtaatcttattgttccgcaaaagcgcatcaagaactaaatcacggcgcttcttcgctaaatcagggtggaggtacggatcgtaattacttggcgattgcggcatacccgcaatcaatgccagttgtggcaaacttaattccttcaacgacttgccataataatacttagcagccgtccccataccattgaccccgttattcaggtacactttgttcatataatactctaagatttggtcttttgaatattgacgttcgacttgaacggcaagccacgcttcttgtgcttttcgtctgaaagtctgatcgctgtttttcgttgagaatttagacagtttaatcaattgttgggttaaagtactcccaccttgtaagcccagcggtgatttaccagtaatattggcgactgcagcagacgcaattcggattggatcaatcccgaatttttctttatagaaacgacgatcttcaatagagactactgcatcttttaatgtttgcgggatttgatcactcttgacataactccgattttcgccaccaattgttttgaaaggtttcccttgatcatcgtatagaattgtcgcattcggactttgcaggtccgcttgcgttaggtttggtgtatctttaacatagtaggcaaacaaaccaatcccagccacgaaagccactacaatcagtagtaacagccattttagaattcttaaaaagaggggccggcgtttcttattagcgggttttgcttcagctttgtgccttgcaactcgcgaattattattgtttcgattatcggacattgttctttaaactcctttatttgaccgctttaataactgatctacggcatctaagtagggaataattggattaagttggtacttaatctcaatcccattgtcaatcacatcactgagtgaaatcgattttcgtgcaccatcaacttgcgcgtcccagcggctaatcagttctgttgcgggatacaagaatagccgttgtagcgggacaaatttcataatgacaaagcagatgccaccttgattcaagcaggctctgaaatgttcaatctgatgttgatggaagttccgaaacggaaacgcggttttattcttcgtttccttcgcttcaaaatcgacgtaacggccctgataaatcccattatagtcagttgttgaggcttgtttaaaataagcttctttaataaccgcttggctgcgggcagggtagtcgaccttcacaatctgaattggcgttggtttcttatacacgacagccgttgcatgtaatcgataatactgattactatcattgagttcttcttccaacgtcatgccgcgtttaccaaataacgttgttgcttctggttgccgggcttgctttttagttggttttgtctcattatttgtataaggctgtccgttaggataatgaaaggccattgaaaatcacactcctgtttcactattatagcaatgtttagtttaattgaaaatcatttgggagggacctgacttgaaacgactatgggtgagcggctatcgaagctatgaactcggtgtttttggcgaaactgacgagaaacttaaagtaattaaatattcattaaaaaagcagttaacacaatatttagatgatgggctcgagtgggtgatcactggtggccaaatggggattgaacagtggagtctgcaagttgctattgaactaaaaacggactatccggatttaaaattggcgatgatgttgccgtttaatgattttggtcagcaatggaacgaaaataaccaagctcaattgagtcagctcaaagcgcgagtcgatttttgcgaaccagtgattaacgcaccgtattctggaccgcaacaattgcgccagtatcaacaattcatgctgacccatacggatggtcaactattatactatgatcgtgaatcaccgggcaaaccagaatatgattatcatgcagcccgccaatatcaagaccaacaagattatccgattaacttggtcgattttttcgaactacaagatatcgcgactgagttagcggaattagatcagcaagagttttaattatccgataactttgctataatgggaatcatagtacatttattctaaatgaggtgtcaaaatggacaatcaaattgaaatcgaattgaacccaactgatatattgaaaaaagaatttaaaacaaaaatgcggggctatgaacctgaagaagtcgatggttaccttgatttagttattaaagactatcaaacttatcaagaagcaatcgatcggctaacggcggaaaatgcccgcttattcaagaaggttgacgaattaaaccgccaactcagcgcttctgataacgtgaaggaaagtgcaccacaacaagcttcagcagcaaccaactatgatattttgaaacgcttatcaaaccttgaacgccacgtgttcggtgctaagttaagtgaacaaaatcaagctccacagacaagagttcaaaatcattcacaatttgacgagacaaatctttaatcttgtgctatacttataaacattgattcaatatttgtaaatcttgagtaatcgcggtctacatcggtaggctgaggaaggtccatgcccgcacaggctgagatgcttgtagtgttcgtgcctggcccaataagccagggtaccttaacggtaacggcggaaaaagcgctaaaacttcggtcatgcgtgaatatccttaaatagtgccacagtgacggagcgtccttggaaacttggacggtggaacgaggtaaaccccgcgagcgagtaacccaaactttggtaggggcgtctcatttatggaaatgaactaaaaatgagagttcgtaagaacagatagatgattactgaaggaactttcttcctggggaagttctggaacaaaacatggcctataaaggtttacaatcaggtggcttgggcttttgcccaagctctttttatttaaaaaataatttcctaaggggatctttaaaaacatgacttaccaactatacgcaacaatggcgagtgggattgaatccattacggccaaagaattacaaaatctcggttatgaaacacgttcagataatggccgggtgtatttcgaaggcgatgtggcagatattgcaaaaaccaatctctggttacgcagtgctgatcgggtgaaaatcgcgattggtcaatttgaggccaaaaccttcgatgacctttttgaacaagtgaaagctttgccatgggacaagttcctgccattagacgccgcttttccagttgctggtcgctcagtccgttcaacgctccatagcgaaccagacgtgcaagccatcactaaaaaagcgattgttgataagttaagtactgtctatcaccgccgaacacgtttagctgaaacaggcgcaacgtatccgcttgaagtcagcatcctaaaagatgtcgtgacgatcagcttagatacaactggtcctagtttattcaagcggggctaccgccttgaaaaaggggaagccccattgaaggaaaacttcgcggcatccttaattcttttaagccgttggcaacctgatatgccatttgttgatccaacgactggttctgggaccattgcgatcgaagcagctttaattggtcacaacattgcacctggtatgcatcgtaagtttgcctttgaagacttcgattggatcgatgcttctgttttagaaaatgccaaagccgaagcgaaagcagccgaaaaagaccaaccacttgaaatttttggttatgatatcgatcaaaacatgattgatatcgctaagttgaatgcgaacgaagctggtgttttacatgatgtccagttcaaacaactcgctgttaaggatttcaagacagatttaaccaacggggtcatcatcgccaaccctccttacgggaaacgattaagcgaccaaacacaagcccgtgctttgtataaagaaatgggtgatacctatcggtcattgaagacttggagtaagtatattttaacaagtgacttacaattccaagaatcattcgggcaacgcgcaactaaacgccggaaattgtataatggtcggattcaaactgatttattccaatactggggtcgtccagtatggccacgtgcagaaaaagaataaaattttttataaagcattgccgttttcagtcggtaatgcttttttatttgctgaaaatcccttataataaagattacttcaataataaggtgagggatcaacttgacagtcattttagcagcagaaacaattcctgaacaacacgtcaaagcactaactgcaaaaggtttaacaatcatcgctttagctgatttaaaaccaagtcaactgggtagtattgagattatgtttggttggaataaagatgtaggcccgaaaattttagcagagcccggtaatcaattaaaatggattcagaccgcaagctcaggggttgattatttaccactagccacgttagctaagcaaggggtactggtatcaaacgcacgcgggatgcacgcaaaaccaatcgcacagacggcattaagttacatattacactttacccgtgggatttatcagagcttacccgcacaagcagcgcatcaatgggagcatcatgctattggtgaacaaatgacaaatttggaacaccgcacactcctcatttttggaacaggtcaaattggtgaggaaattgcaaagtatgcccacgtcatgggtatgcacacaattggcgttaatcggcacgagaaacccgttgccaattttgatcagattctaaccgacacggattacgaacaagcattgccacaagcagacttcgtgattaatgtgatgccattaacaccggtcaccaatcggttcttcgacaccaccttttttacgcaactccatcgaggggcttacttcttcaatttagggcgcggcgcttcagtcgacgaagcagctttgatgcactatctacaatccggtcatttggcaggagcagcaatcgatgttgcccaaaacgaaccattaccaagtgattcaccattatgggccacaccaaacctgattatcacgccacatatttcaggttacatcgctgatatccatgaacggctcttcaaaattttcgatcaaaatttacccagttatttagacaaaggtgaattatccgtcaatccggtagacttgtcagccggctattaaaaaacagcgtttgaagtgaaccccaaatattggacgaaactttaagcagctttctattaaagtttttgctgaattcgttatactgcaattataagcgtatttaaaaaaatagttgaaatgggagggatttatatgttggaaagaaatttaacagttattggaagttacagtacgagagaagaagctttatccgtgatcgaacaactgcaaagagaaggctatagccgtgatgatatcattatttacaccaacaaagatgcagctacaaattttggttttgctggactgtcaggaatcgatgttaaaaccggcgtaaatggcgtcgaaacgactcacgaagatcgctcactatgggaaaaaatcaaagatgcattttctgctgatacgtacgaatacgattcaagtttaaatgaagaagctgaccatgcaaacaacgacccgctttaccaatatagagatgatatctcagctggaaaaattattatcaccgtcaataattataaaaacgacccaacacaagcaactgaaaatgttacaggcagacatgcagctggtgacactagcacaaataatttacatgcatcagatgctgcacgtgcaactgatctagatactgatactgatagtatccagcttaaagaagaacaattggatatcaataagcatgatgtgacgacgggtaaagtcgatatccataaaaatgttgtcaatgagacgaaaacagtcgacgtaccggttaaacgagaagaaatcgtgatcgaaagaaagcccggagatggtgcggctgcaactaccgatgtcaatgatacgctagaagacgacacgatcacgatcccaatcaaagaagaacagatcgatgtcaacaaacgcccggtcgttcgagaagaagttgacattcgtaaacaagaacacgaagatatgaaacaagtaagtgaaaacgtcggccgcgaagaactagatatcgatacgagtggtgatgcccacgtagaagacttacgcgataatgatcgcaacaagcatgaccggagctagtttctagctttgattttatcaaaccttttgaacaagaacttaaaaaagattactggcagccatcagaagatggctgtcagtaatcttttttggctctttgtgtgcgttcccgcaattaaaagccaaagaagccgaaaccaacgtcttcactttggcttcggcttcttttactgaatcaactaaaagaccacgtggtttccacgtctggttttactgctcttatactaaaaaaatggactatttgatagttatagaccctatatattcatagcccctttctgtttggtgttaaagtattagtcatcgatgtcatgcactatcttgtttagctccgttttgatggaactgggaatattttctaaattgaaatgattatatatttctttatccttaagcatccttttttgtgccttatttaatttacactcattgttacccactacccattcatcctttgtacgtataaaggggttttgcgcactttcctttaacgcgttttgaacatcttcataaggtaaataaaattcaattgtagatttatttaattggtagattgtaacgtctccatcttttcaaaacgacttaattctacgggctataaataacttaatttgccagtgtataacgtttcagattaagctaccactatgttataataaccatatcgaaaggagatcaatctaatgaaatatacgaaaaccaaagcagtattaaatcaactcgttgccgatttgagccagatgtcaatgattatccatcagacgcattggtacatgcgtggacccaactttttgaagttgcaccccttgatggatgagttcatggaagaaattgacagccaactcgatgtcatttctgaacggctgattgcgcttgatggcagtccttactcgaccttaaaagaaatggccgaaaacactaagattcaagactggcctggtgaatgggataaaacaaccccagaacgcctcgcacacttagttgatggctatcgttacttggaagacctttaccaacacggcattgaagtatccgatgttgaaaaagacttcagtacccaagatattttcattggtctcaaaaccgcaattgagaagaaaatctggatgattcaggcagagcttgggtcggcgccggaaattgatgaataaaataatattaaaaaatcggtaggcttatggtagattgtaaaattaatccgaacgcccatttggatattggacagccctagttcacaaaaggtttcgattttaattcgttcggaataggttatactagacaaaagatcagctcctaaaagatgggtttgtggtaaacaccattttaaaggaagctgatcttttttgtccgaacagcgttcggattaattttacaatctaccacttaaaaaatgacctcactctatgttaaagcctacaatttcctaatctatattttttattttaccaaaactacattgtgtagtatcttttaaatagttcataattacaatgaattttatagttacttactctttaacatatctctcaatcctcataaccaagaatgttgatttttaagcagtcctttagaatccggacatacttttagatcattcatattcgtttaattaactattgaaccactagaaggcacctctctactcattttacacttttcatccccaaaaaagatccatataaataataacataatcctcaaaaaccacaaaaataacggccccatttagggaccgttatttttttacttttaaatcagcggattttcatccaccgccggcaagtatctgccagccaatccggcaattaccgttagcaagccaacgctaatcaggccggccaagtgaatcaactgactggttgtgtcagacattgcgacgctgccactgatttgggcaatcacggccgttatgtcttgttgccgcattacggctaggcccatcaagccggtgatcaagataaattgcattaggatactaccgagatacgtattccgatatttaataattaaggtttgggccggcgtcgtgacgccggtgtaataagcgcgatgatttaaaagaatgctgttggcactgccaaagaaactaatcaataagatgcctaataaaattagatgtggcgtaatcatcaaccacgcaccagcaacaaatcctagtaattggacttttaagtctgataacttcgaaaagcgcccttgcacgctctttctaataacttgggctaaaatcatccctgcaccgtaagtcacgtaggcgcctatcatcaaactctgattttgaattgcgacaaaaatatagagcattaagaatgtttcaaacgccccgttaattaaagccgcaaccaaaagccaacccggcatcttcgttttagtgccgcgcgtgatgatcacccgcaagattagcgcgactaacccaatgacagcgactgtgattaataaccagacaaatttagcttcaaaaaggcgcagatatcttagcgcaaacgccatcgcggttgcccagacaaatagttccaagttattaagcgatttggtttgttcgacgaacaccgattcatcaagttgcttcacaaacggttcgaagcgttgcatgccaatgaaaccaatcaatacaaatagcatgataacaataaagatgaaccgatatgaaaaatgactagcgatggtcaacagaccaaccgttattaggctaaaagccaataacgttttaatttcagtgcccataaggtgccatttccaaaccactcgctcgtgataataaacgccctcataggttggcatgatcacactggcgctggcccccaagataaaagccgccatatcggttagatacaaccacggcgaaatggccaataacaataaggcaccagcagctagcagcatactgatactagttattttaaacgaattctgcacgtggcctagactattcacgaataataagccagttttcaacgcggtatagaataagatatacggcatataagacgccactgactgcccgctatgaatcatggttaagccaattaaagggagaatttgaattaacttcgccaccgcaaagacaatcccttgtttaattttttcactagtcgctaattgttgcccatttgtcatcaatcatccctactttcattgattagacggtaccttatattgcgtctgatttcaaagaagtaccgttaaaagcctaaattgattgcacaaaaaaaaacaccgtaagtcgtcgaaacgacttgcggtgttttgattaggattttattcccactccactgttgaaggtggcttgctcgtaatatcgtacacgatgcggttgacgtgatcgacttcgttaacgattcgcacagaaaccttttgcaagatatcccatggaatccgtgagaagtcagctgtcatgccgtcgattgagttaacggcacgaatcccaactgtgtaatcgtatgtccggccatcacccatgacacccacactacgaatgcctggtaaaactgtaaagtattgccatacagttttatctaagccagcgagtgcaaattcttcacggagaattaaatcactatcacggacaatctttaatttgtcttcagtgacttcaccaaggacccgaatcccaaggccagggcctgggaatggttggcgccatacgagttcatatggcatgcctagtttttcaccaaggtcacggacttcatctttaaataatgtatttaaaggttcaattaagctaaattgcatgtcttctggtaaaccaccaacgttatgatgtgatttgatggttgtcgcagtacttgtaccactttcgataatgtcagtgtataaagtcccttgcgctaagaaatcaattccgtttaacttagttgcttcttcgtcgaacacttggataaattcgttaccaataatcttccgtttcttttctggatcagaaacgccagcgagtttactcatgaaacggtctttagcgtccacttggatgatgttcaacccaaatttaccgccaagactttccatcacttgttcaacttcgccttttctgagtaagccgtgatcaacaaagatgctgaccaattggtcgccaattgcgcggtgtaataacaccccaacaacagatgaatcaacgccacctgaaagaccaagaaggactttcttgtcaccgacttgttcgcgaatcttttcgatttgcatgtcgatgaaatcgttcattgtccagttgtcttgggccccacagacgtcaaatgcaaagttcttcaaaatatcgttcccgaattcagtattccgcacttcggtatggaattgaatcccataaatccgacgttcacggttttcgatggcggtgaaaggtgtattatcactttcagcaaccgttacgaaaccttctggaatcgctgtgactttgtcgccatgactcatccacaccgtttgtttttcaggaagacctttgaataagtcactgtctttgtcagtgactgtaatttcagccttaccatattcacgttctgttgatgcttcaacattcccgccgtttttaaaactgatcaactgcatcccgtaacaaatcccgagaattggaatccctagttcaaaaatttcggggtcaactgaaaaggcaccatcatcgtaaacactcattgggccaccagagaaaataattcccttaggggcgatcttcttgatttctgctgctgttgtcgtgttaggcaacaattcagagaaaatcccgaattcacggatacgacgtgtaatcaattgattatactgactaccgtaatctaatacgataatcttatcgaaatcttgcatgtccttttgggccaaacaactcactcctctttttaaaaagcaatttggtgtgaacaagtaacaccaaattgctagattcatagcactaagtcaaactataatgtatctattttactgattaataatgaaaacgtcaatggattgacggccttcctgtgaaaaaactcattctattattaatatttacgtaggaataccttatcaatcacgtgatgttttgttttatgcaaaatgacatcggcacgattacgcgttggtaagatatattcgtttaaattttgtaaattaatgtcacgccatacccgccgcgccatcttgaatgcactctgtcggtcactgatggcgtatggataatagtagttggtcggatcatctttggctaaatcgagtaatagatcgaaacgttcaaggaaccacttcttgattaagtcggcttgcgcatcgacataaattgaaaagtcgaagaagtcactgacgtaaatctgctcagttgatggcaactgtagtacgttaattccttcaacaattaaaatatctggatcgtcaatcacgtcgaactcgtcgggcacaatgtcgtaaatctgatgtgaatatttcggtgctttgactggtccaacattatttttgaccgcattcataaattgaattagatgcggcatatcataactttcgggaaagccttttttatcaagaatccctttttgtttcatcgtggctgtcggatataagaacccatcagtcgtaatcatttgaaccttcttatccgggtaggcccggctgagaaggagttgcaacaagcgcgccgtcgtactcttgccaaccgcgacgctcccagcgatgccaatgacaaatggtgtcctatgtggcttaatctctagaaattcagatttttcggcctggcgtatctggtactgttcatagtgcatctgtatcagatgccgtaatggcaaataaatatcactcacatccgcaagtgaaatccgatcattcaatccccgaatctgttccagctccgtgtccgtgatgccagtatacgcgtcaccgcggccatgaaaaacccgccactcatcacgcgagatttcataatatttcatctcgttcttcatccgacaatcctccaatactaaacgcatccattttaacattaaaaacagagtgcgtcatcttgcgattatattccgaggaattagtctagtaccgtgaataagcgccttaaggcgattgtttgcggtgcgtaactaaccacaggaatatgcaagatgaaagcacgtttcaaaacagagtgcgtcatcttgcgattatatttcgaggattagtccagtaccatgaataagcgctatttagtagctcgccttttttctttatgaatgattatgatcagcatcccaaagttaagcaaactaatcaccgtccctattctctgaatcgtagttgttcgataataaacggtgattctaccagttcccttcaacgcaacttgtgttaacccagttcgtttattcatctgcattggtaatcgctgatgatggttgagttcggcaacgtaccctttgtaataaataaaggggacttcaacaactgctttttgatccgtcagtgtcctgaaatcaaactgataacggccccatgtatgccgtacatttgtaatttttattttatgcggctgatacttaacgacctgttttttatgtcgcaaaattttctggtagtcggtttgagcaggtaaatactcatgtccggccccaatgtaataagggttgggcgtgttataggcagcattcgttctaaagcgccaactttggctttgaatactattcgtagagtagatgacatttcctgcgcccaacaacagaattagcagataaaagtagtacttattctttaataaatgacattcatccttagcaactaagtaactcacaattgccgtaataatggcaaaaaaacgccacgggaactgaatcgtattgataattgtatgatccaacaaatgccacggcataatcgacgtcgtagctatgaatagccccaacgcaatcccaattaaatcacggtcgtttttggaatagtaaaatagaccacacgcgatgcctaatccgagtagaatcgtgataccgacattcactgtattcgcatgaaaaacagcattcgttaatgaattaacaacaatgtctttaaagggtaatgtgcggtcagataaaaatgccaggggttgtgcggttacttgaaaaatcgtggttgccatttgttctccaaccgctaagaaataacgccctaataaaccgattgctaataagccagcagcaatgagatactttaaacttttattttggtagaatctcttgagatttaataaggtataaataatgatgacaatgcccatcatttcaacagaaatcatatgactataaccaatagctgccatccctattgataacagataccaataccggtgctcacctttttttaaccgcgttagcatcacaatcattaatgggaaaaaggtgagcgcgatcacctcaccaatggcttgccgattaactaaatctgcaaaacgataagtactaagaccgtacatcaaagagaatattaatgcttgcttcttattaaaatccgctaattttcctgaaatatatgtgattaaaaacgtactaaaattaatcgcaattgcaaatacaataaaactctctttgattgatagtcctactactctcagaatagctggtaagtagagaaaagcatctgggtaaaaaagacctgccgcatagcccattccgccgatgaaaaagtaactgattctcggaaaccactctccctgtttaatcgaaagtgccaaattctcaatgcggttcatgtggaaatgatagtcagaaccagacaggattttattgggctgtaaatagacgattgcaaccatcgcaatacttaatagtccaaaaaataatagggttactgttaaggcatgtcgcctgtaaaaatactttaatctttgcatcatatactcctcataaaaatactttagtatcgataattgccattccagcatcagtctaagggggacgatcgaattataagtaagtataatataaataatgtaataatggacattatttatatataaactttaacgaatagaatcggtcaatgtacaatattttgtttggcaattaataagtaatccataagctaagaaagcgataagatgcaaaaaagcgggctaaataattattagcccgctttaaaacccattaaatttataaataaacattttaataattaaaagcgctttattaaaatattcattgtccattttctcgcgattacacttttcatccaatcaaaaaacgcccgcctttcagcgcgcgttttttctatttaattaacgtgtaatcatccgcatccacattatcaatcaatggtgacatgccacctgttgctaataaagtgaggcgatgcatcgctcttgaacagatcgtgtagagcaattgccgttgatcttcatgattgtagttagttgcgctgacttgccagccgataatcgcatcaaattccaaccctttggctaagaaacttggaacgactaacgtgcccgctgccaaacgttgattttcggaacgaattaaagttacttttgtaccactggctttcaacttagctgttaattcttgggcttgcaccaatgtcttggtgataatcgccgtcgttaacttatctgcttcatttttagcgagttgcgcattcacatcagcgaccaattgatcttcgctttggcgcacaatcaagtttggcttgtcgccttcacggttgaaagcttcaattttttgaccgccctttaagagccctttggtaaagtcggtgacttgttcagttgaccgatatgaacgcgtcaattgaacgaccttcgtattttgcgcatcaaagagttgttgcacttgttgtaataggttcgtgctgttttctttggtgaaaatcgcttggttcaaatcaccgagtaacgtgaagcgcgccttagggaagtgcatcttcaagaaggccaattcgtatggtgtgtaatcttggatttcatcgataaagacaaagcgcatgtcgcgttcgccgtgcttaccggtcattaaatcataaagatgcaagtaaggtgtcacatctgataacgtcatttgtttggcctttaaattagcgacaaaatcagtcacatgatcattccagatttctggtgtcagatcaaattcagccaaatcaaccaattgcggcacaacccgcatgaagtggacgtattgtgcttgaatactcaagaagcgattgcgttgaattcctttttgaacgggtttgaaagccttcaaaacgatttgcttagcgatatatttactttccgcttcaccagtcttaaagtccttacccgccataatttcgcggagttcctcatcacttaagttttcagcgcgttctgtcacccagtcagccttcgtttcatggtcgactttatggctcaaactgcgcaataaactttccttcgtcgcatctagccggttccctaaatgatagttttcgttgaaacggtagtagacgtcgctgatttttttcttactaatcaagaccttcccgttcactttcaaatcacggaaacgcatatcgcccttttcaaggtgcgctgcgtaacgtttaactgctttatagaagactaggctttctttcaaacggctaatccgcgcatcagtttccgtgattggtgtttcgaattggtcaaataaactctgaacagcaaggttcggcaaacgccgtgcaacatattgatagtaagtcatttgaatcatgttttgttcgccaagttcaggcaacacgtcagcgatataatcgttgaacaattggttcggcgagaacatgatcacttgactggaatccaggttaccccgataccggtaaagtaggaaggcaatccgttgtaaaatcgcggatgttttcccagaaccagcggccccttgcacgaacaataagtccgcgtcagtgttccggatgatttgattttgttcccgttgaatggtcgtcacgatactcttcatttgtgtatcagacttttcgcccaatacttccagtaacatttggtcaccaattgtttcttgcgtatcaaataacgccttaatttggccatcttcaattaagaattgacgtttcaaagaaatattgacgtcttgcgggccgtcaggcgtttggtacgtaacttcaccagtcttcccttcatagtaaattgatgaaataggtgcccgccagtcataaatcaagaaatgatcttcgcgatcggtgaatgaccctagcccaatataaatggactcagactttggttcacccttttctttaaaatcaatccgcgcgaaataaggggttttttccattttttgtaaagtctcaagttgccgggaagattgttgccaagaattattccgttcttgcaacatttgccgttgttgttcgattgagactgccgtttcagtcattgctgaatcattattgaaattcaaccgtacatcattaaagaagtttgcgttaatttctttttcttctgatttagcccgttcaacggcgccttcgaagtgcttttcggcgtttttaattaaaccgacaatctcggttaaacggcgttgttctaatgatttttgttcgtcagtcaaagcagatgtcccccgatttctaaataaacagttctacaagtttaacactaaattcacaagagtgcgacgataggcgcttatattttgagcattaactggatttaccgaattggcgatgcaatcgtcggttcggtaaatttggttaagcgtagaaatatgcctatcggagcacgtttagagtgcgtttgaaacggtttaactttcgagcattagcctaatcagggaaataagcgatgtagtcgattgttttcctgatgtagctaagcggaaaaagttatttgctagagcacgtttcacgatcttcctacaaaaaagccggccgctgcaaccaccagccctaacccgtaggttaatagcagataaccaaagaaaatatggtaacggcggcgaaaccacagctgactcaattcgctattgaacgttgagaaagtcgtgtagccacccaagaccccgacgcccaaaaagggcgtccacgtttgatccaattgtgccccggtcacccaacctaagcaaaagctccccgttaaattaattaaaaaggtgattaatggatattcgctggcaatctgcgttccaagacgggttaattgataccgcaaaatagcgccgattgccgcgcccaatccgacaattaataacgtcatcattttagcacctgcgactttccttgccgatcgagcagccaaactgcccagtaatctgccactaaacttaagcagacaccgccaatcaaactaatcccgatatacaggctaaatggccaccattgattggccaccaataacttcaatgcatccacgctaaaactagaaaaagtcgtgaaggcgccgaaaaagcccgtgcccattgcaagtgccagcgtatcgctaatctgataacgaaccacgatgtaacgcattaaaaaaggaagacaaaacgccccgattaaattcacacacaaagtgccatacggaaaccctgctgcttggtgcaatccgagcccaattgcatagcgtaaaatcccgccaaaaaaggcaaaaattccaaccgcgagactttcttttatcttcattttagatcgccccctttttaatatcgtagcatctattttacagaagttattaccaattgtaaattagttgtagatattaactagcgataatgccaactttttaataataatttaatcactaacgaattatcaacaaaatcgataatattagcgccaatatataaaaagccaattttacgaacccgtgctgttgctcggaagctattcggctttgacatgctttagtacccatctagctatcaaagccaacttcctgtgcacagctgtggcccgcaaacagtcggctacaccgcctatttacgaacccgtgctgttgctcggaagctattcggctttgacatgctttagtaggttagtgtatgctctacacaactttattgagcattgaaaggatcttttttatgacaagcttagcgctcgtaatcgttctattggcggctttaatgacgccgttactcatggcaaaatttaagatttcttatttaccaaccgccgttgcggaaattttggtcgggattttactcggacaaagtggcttccacctcatctcaaccacccccacactgacggaactttcatcattgggtgtgaccgtcttaattttcttaagcgggatggaaatcgactttgaactctttaaaaagcaacccaccacagctaaatctggcgttaaaacaccgctgacgcccttacaactggcagtcggtagttttacgctgatcctattaagttcgctaggactcgccagtttattggcatggagtgggttgttcaccgatattggactcgcaacaattctcttttcaaccatcgcgttaggggtcgtcatcgccgcgttgaaagaaaaagaactcctcagccagccgcttggccaaacaattctgttaattgccgtcctcggggaaatcgtcccgctgatttcgttaacaatttatgccgccctcaataatcctggttctaagagtctgtggttactatcactaattttcttagccgcgatcttcttattgatgcgttttaaaactgtttatcacttctttgagcggattgataagtcaacgactcaactcgatattcgtttagcctttttcttaatcatcacacttgtatcgattgccgaagaagtcggtgccgaaagtattttgggcgctttcttagccggcatggtcatgaaacttttacgcccccgtgaagagacgcaagataaattaacatcaatcggctacggctttttcattcccatcttcttcattatgaccggtgcaaaactcaacatccccgcgctcttacgtgatcctaaatcactgaccctgattccctttttcttcatcagtttcatgggcgccaaagttttgatttacttcgtcttaaaacggcgcttcaaagtcaccaacgccctcgccgggactttcctcagttcgacaaccatcacgttggtcttacccattttgacggtcggtctcaacttgaaggttatcacgacacagcaatccggcgctttcacaattgcagcggtgattagctgtattcttggtccgattctgttcaatcgattctacttaccaacacctgaagagatgccgcgcaaacgtgttaacttcatcggcgcaaacatcatgacaattccaatcgcccaacagttatccaaaggtctgtacacaagcgaattatttaccaataacgaacaaaattatcaaatctaccatagccaagccaacctcgaactcttgcctgacttggcaccagccaccttaactgacgcggccgtcttcgatacagatatcctggtcttaggctatttaaataatgagcaaaattatcaacttgcccaacaagcgattcaggccaaagtaccgcggatcatcgcccgctttgaatttaagaatatctcggacgatcaatacgatgaacttaaagaacatggcgttgaaatttttaacacttacgaagcaaatatcagtctgttgcgaagtttaatcgagactccatctaccttacaaatcattgataacaccgatgccgggctcttcgaagtcatggttaaaaatcggcgcttcaccgggattcaactttctaatctcccatttgtggaccaagtcacaattagtcgaatttaccgcgataagcaactgatcatgccgcatggtgacacgcaaatccatctcaatgatcacctcattctaacggggaataaacaggctgttcctgccattcgacgccaattagaaacgctcaactaaatcatgttgaccctcgcacattctctctaataggtttataatgaaactatcataattaaaggatggtgcagatatgaaacaaggaacaacaatcctcacattggataatggttaccatttatggactaatacgcaaggaacaggcgacattcatttactctgcttacacggtggccctggtggtaatcacgaatactgggaaaacttcggtaaggaattagctgatcttggtgtacaagtacacatgtacgaccaacttggttcattttattctgatcaacctgattactcacaaccaggcaatgaccaattattaacatatgattacttcttagatgaagttgaagaagtccgtcaaaaactgggcatcgacaacttctacttaatcggccaatcatggggtggcgcattggtccaaatgtacgctgctaaatatggccaacacttaaaaggtgccatcatctcgagtatggtcgatgaaattgacgaatatgtcacaaacatcaacaaaattcgtgaagacatcatgacccctgaacaattgaaattcatgcaagactgtgaagctaagaatgattacgacaacgatgaataccaagcacttgttgacaagttaaacgctggttacgttgatcgcaaacaaccacttgcaatctcacatttaatcccaacaatggcaaccgacgtttatggcgtcttccaaggtgataatgaattcgttgtgactgggaaattaaaggattggcatttccgtgaccaactccacaagattactgtcccaacgttaatcacatttggtgaacacgaaaccatgccaatcgcaaccgctaagatcatggctgaaaagattccccatgctcgcttagtgacaacgccaaatggtggtcaccatcacatgattgataacgcacccgtttacttcgatcacttgaagactttcatcaaagacgtagaaaatggcaactttaacgattaaataaaaaaagccgcgcacaaatttaaatttgtgcgcggcttttttgacctaatcaataatatctgaattaggttcccatttatccagtgtatcgaataagtggtttgtttgtgcgaataattgagaaaggtctgcattgccgtcatctttaaaatgtttaaagaataagtagaaatcgacttccaattgatcaaccattcgtaatccttgctcattcaatgaaatgaatactttacgttggtccatttcatcactgcgatttttaacaattaagtgttttctgaataaaacattaattttacgtgaaattgctgggcctgaaagatcaaaggattccgataatttcgccacttcaatattggggtttaatttgacctctctgagaatcaaaaattgatcgtatgtcaagtcgtgcgtgacagttaaatgatttatcttattgtaaatttggccaatttgcagataccattcgttgaatcgatcaacaaggttactatccgtttctggttgcatcgaaccactcctttacataaacactaaacgtggttattaagtgttactagtcaaaaataacacaaaatgtataaaattaaaagatttatgcttaaaatattaataaatattgataaagttatttattagtatcttttaaaatttattctctcttaatgataattgcaattgcttataaatcaattgttattattaccattaaaaattataaatgtatataaccgttttgcaaaaaatatggaatgaccctgcacaccatttttatctatgctagaatgaaggtactaaaagctattgttggagggttacgatatgaaacgaatcacactttatttagtgcgtcacggtcaaacattctttaaccgttataaccggatgcaaggttggtcagactcaccacttactccgaaagggattgcagatgccgaacgcgctggcaaagaattagcgaaagttaattttgctcaagcttattctagtgaccgcagtcgcgcaatggacaccgctaaaattattctccataagaatttctaccttgatactccatatgctatcacaccgcacttccgcgaagaattctacggctattttgaaggtgaagattcacccaaagcgtggtacatggcaggtgccagtcatgatgccaaaaccttccaagaaatcatcaccaaatactcactcgatgcctctaaagatttcatgaaagaagctgatcccttccacgatgctgaagatgccgctgaatattgggcccgcgtcggtaaaggtttcaaacaacttcgtgctgaatgttctgacggtgataaagtcttgatggtcagtcatggcacaaccattcgcagtattgttggcaagtttggtaacgaccaattcgatgttaccgttagtccaatgaacggtagtattactaaagttattttaacagacgaaggcgttactgttgaaagttacaatcaattaacccttcaatagtatcaaaacgataattgatgtatgaatattcattgaatatagagctgggcaatattattctgattgttcagctttttttgtgggcaataattcatgccgttcaataataatacgcgcttcaaatgacagtttcggcagtcttctttggctttttttgtaggtaaaatgctcaccacaattgtagctaagcaagttaaaaactaatccagcgtggtatacgcctcttaatgacatcagtgtaacaagtagcgtctagagaaacaacttcgacctcatctaaaaagagccccctttaatctcgaagttcagattaaagggggcttttttagactgattcctatgttttaaactgtttcaaccatctactatttaacttccttcaacacaattcctttgtagagccatgtagtgagcaagtagtagattgcgtagagaataatgaaaattgaaaatggaatccagagatcattatatggatcaatcataatcaatttgaacaattgaagaccaaagaggacatggatgacgccgacgatacctggtaagaggaataagaccccaatttctttggcaatggattgttgcaatagattgcgacgcgtcccgattttagccaacattgtgtagcgtttaacatcactagctgccccagataaaatcttgaacatcaagcaacttgctaacatcgctaagaatgcaatcccgaggaagaagcccataaattcgagcccactgaacatgctgttcgctagcttatagttagcatacttgctactatccattgtagccccttgacctttagccaattcaggatttgcaatcacttgttgtgcgtgaatttttttgataacgggtaaattaaccgcaaagtctttgacccgatatgttttaacttgcgtggttgcgcctgccacttgattaaattcagcgtcagagacgactttaacgtccttactagattgacttggcacttgaattgcgcgcaaggatgaagaatcgccgttttgaatctcactgagtttcaccggtttaaccccttttgcgcgggcgacaccattcccattaccaaactgaatggccatgattggtgacttttcaagttgtgctgtccgatagtagacagttttcgcatcttctttaacatcgtaattagcagtcgccttcacaccctttaaatcttttgtgaggcgcaatgcttcttggttcggttgatttaaaacaacgtcgtaaggcgccattgtttctgccatttctggaatttcactttgatagccaatcccaactgtgattgcgcctagtgccaatgcaaataacatcgccaccaatgcgagcatcttggtgtaatccttaatgcggaagctcaattgcgctaacgtaaaattatttaaaccacgattacgaatcttgctgttacgtttgagcaacgtaatcaaccagccgaaaagggcattaaacaagaagtacgtcccgagcacaattgtcactaatgccacaactaagcccataatttggaacgttgcgactttaatcatcatatagtaaccaacagctaagaaaagtaagcccaagacaatttgtacaatacggcttaatttattttgtgaaacgcgatttggttgttgatcatcgtgtaagagttgtaaaactggtgttttcaaaagttggaattgattaactaccgctgcaataatgaacaagataatgaagaaaatcaaagttactaacactgcaggtaagtaaaatggtgaaaaatgcttaatctgaatatccatttgagacaataacagattgctaacaatttgggttaatccgaccccgagcgccgttccactgagagtagcagctgtcccaatcactaatgtttcagcagcaattagttgggcaattttgcggccttttgcgccgagcatcataaacatcccgtaatctcgacgccgcatgctcattaagaaattattcgcataaataatgtagactaatgtgataatccctaataaaacagacccgatttggaaaataatgcccgccatgctaattggcgagttactcgtaacgaaacttttgttagttgccagtgcttcgaacatgtaaaaaatggcacttgccataattagaccggaaaaaagcactaaatagtctttcaaacggcctttaatgccggttaatgataacttcaataacatatttagacttcctcctaatggttaaatgtgcctaatgtatctaaaatttcttgataaaaggcttcccgactcttatcgccgtgaacgagttcttggccgatttgaccatctttaataaacaagattcgttgacaataactagctgaaaatggatcatgcgttaccaataagattgaaacgcgttgttcttcgttcagctgagccattgtatccaataattccttggcactctttgaatcaagcgcacccgttggttcgtctccgaataaaatagctggattatggactaaagcccgcgcagcggcgacccgttgtttttgaccacctgataattcggttggatatttgtttaataaactatcgattgataacgtcttggcaattgatgtgactaaatcgcggacttttttaccgccaacattttgtaacgtcaatggtaatgccatattttcataggccgttaagttttctaataagttgaagtcttggaacatgaacccaatttccttggcacgaaaatcagctaattcattccctttcaacccattaattgcttgcccgttaatttcaacttggccagcagtcggtttgtcaagggttgataaaatgttcaataaggtggttttccctgaaccagaagcccccatgatcccgacaaattcgccctgtttcacatcaaaagtaacgccttttaaggctgtgtattgcttttcgtttggtttaccgtatgtttttttaacgtctttgacgctaacgactgttggtgtgtccattaataatgcctccaaattttatgataattctatcttataagatattaaaacggcatgcgcgctttttagatgacattttaacgggctaaaataacaattttgtaagattattcccccgttctttaaaaatcaatgtgaaacagtcaaaaaagttttgtcttccctttctgatttgactataataaaaacattgtgaattttcagaaaaggggtttctttacgatggatgaaatagaaccaaaaaagaaatatattacctggcaagtccttgctttaatggattttgtgaccgtcattggatttgacgatattatttataactttcaaaaccaagggatggcagttgtcttctcatggattgtcttactattcgcctatgtcctcccttatgaattaatggttggtcacttaggctctgctttcagtaaagacggtggcggtctttccagttggatgcgccatacaagcggtgatgtttggggttacttaaccgcttggtgttactgggtagcgagtttgccatacttggtcgatgttgctaattcaatggtcgtttccttcttttggattattactgggaacggaaatcttgaagacaagctctcacgggcttcctttgcgcttttaacagccgcaattaccatcctcttcatcttcttccaacacaagtttacatcgtctctacaggtactcagtatcgttggtgggggggcgatgtttgtcatgaccatcctctttgtcctaatgacctttgttggtttattgaacggtggtcacgttgccacccatccattaaacgcacacaccttcattccaaaatttgatttacattacttctcaaccatcggcctcttaattttcgccatgaacggtgccgaacttgttgcaccatacgttggccaaatgaaagatggtaaaaaagattttccaaaagccatgatggccctcgctctaatgaccgccttcctaaccatcttcggctcattagcaatcggcgtcttcttcgatgccaaccacttaccagctgacttgaagatgaacggttcatactacgccttcttagcccttgggcaacaattccacatgggtaaagtcttactctacatcttcgctgttacccaagcgatttacatgggcgctcaattagcgatgctactcgatggcggcacacggattttcttatccgacactgccaaacaattcttaccaaaagcactgactaagaccaataaacaaggccttccaatcaacggttactggttgaccactgggatttgtgcctttgttttagcatctagtgcctttcttcccgagattaacgacatcttcaattggttgttaaatattaacggtatcgtctcaccatttgtaacttgtttcatctttgtcgccttcttacgggtccgtttcaatagtgaaaaattcccatcagaatacacatacattaaaaacaaaccatgggccatcatcgttggcttctggtgtttagccattacagcattaggaacgatcttcagtatcttcccacaagatgccacacctggcacagccaaatatacacacgaattaatcttaaacatcgtcgtctcagtcgccttaatgggcctcggcgtgattttaccactggttgcaaaattccaaagaaaacgagcagcctaactaaaaaaagattcgccccatatgggcgaatctttttttattgcctgggaaatgttaataaatcataaagccatctggttcaatgatggtcgctgctgtttgctgctgaaccccttcagacagaattggtgtcctcattgatgcaacactaacggctgtttgacctgcattaaaaacagccgtcaattgttgctcacctaatcgccgagtcatttttaagacgtcgggatgagtcggctcaattaaccactcaagctgtccttccgacaatagtttttgtttaccatggcgaagcccaattagctgcttaacgaactgatacatggcttgatcttggtccacgggatcccacaccatgcatttacgattagcaggatcgtccactcccgtcatgccatactcatctccataatagaggcatggcacacccggctgtagatacataaaagccatcgtttgacgcatcaagcgtcgattgtcgttggccatcgttagcaaccgcggcgtatcgtgcgaatctaggatattaaactgcacctgattaatttgatcccggtacagcattaactgtcgattcagcttcgaaaccatttggtggagcggaatttttttatgaataaaataatccaaaatcgcatcagtgtaggcgtaattcatgactgcactaaactcgtcaccgctgagccaactctgcgctgaatgccaaatttcaccaagaatatagaaatcaggtttagcagcatcacacacctgtcggaactttttccaaaagtgatgatcaacttcattggcgacatctaaccgccaagcatcaatatcaaatgcttcaatccaataccgcgctatcgataacaaataagcttgcacctctggattagccgtatttaattttggcatgtgtggcgtcgtggcaaagacatcatatgtaatgtctgtagcatcttcgaaattccgacctggctgataacgcactggaaaatcccgaatatggaaccaatcagcataccttgaagccgcgccattttgaatcacatcttgccattgtggtgattgatcgccgagatggttgaagacagcatctagcatgaccttaatccctctttgatgacaagcagtaatcagctgccgtagcgtctcgtcattgccaaaatgtggatcaaccatccgataatcacgcgtatcatatttatgatttgaaggcgccatgaaaattggattgagatacaatccattaatccctaacgccaccaaatgatctaaatggtcaataaccccttgtaaatcaccgccatagaaatcttgagcctgtggtgcctcatttgtccacggtaatgttccatctggatcatttgtcggatcaccatttgcaaatcgttcaggaaaaacctgataccaaaccgtttgtttgacccactctggtaccttagcccgatcaatttcttggaaatagggcatccgaaaacaagcatctattttaggtaagattggaccaggcccctgatcaccataaaaagtgctggtcccgtccacaccaatcacttgaaaagcataggctaatcggcgacgatcaatggtcagttcaatcgtccaaaaacaagcgagatccgttattaagccttgctgcatccgaatcgttttcggttgccaactgccatcgactaatatataaggatccccatacactaggtacactgcttcaacgtcattacttgccgtctgcaatcgtacccgtagcctatctggctgatataagaaagcaaactcactatctggtcgatgataaatcgctgctaaatccatttgtctcctccttaaaaaaaccagtccaacacacacccgaaggcccggttgcactgattaattagtgttgatactgttcaaaggcttgttctaacaaatcagccgttaacgccgccgttgtagggacaacaaccgccgctgctgataattcgctcgcatgaccaatcgcaaccgaaacagcgcctgcagcattaatggcggccacaccagctactgaatcttctaatccaacgcattttcgcggattaacagcaatcttctgagcagctgcgatgaagatatccggggctggtttaccttggtgcacgtcattcggattaacaatcgctgtaaaatatgctgataaagctaatcgatcaagaatgagtggcgcatttttgctagcagaagcaatgaccattggcaccccgcgcgcttttaatgctactaacaacggttgaatacccggtaaaatatcggcagccgttaattgcttgatagcagccacgtaattttcatttttttgattcgccagtgctgcgagttgtgccaccgtatactggccatcaagttgggcaaaggccacaattcgttgcaaggatgcttcccgactaatcccttttaactcagcttcaaagctatctggtaagctgacgccaaacgcttgttgcgccaattgacgccacgccgcaaaatgaaatcgggctgtatccgtaataaccccatctaaatcgaataagacaccgtccataataacctcctattccaacatcatcgacgcatcattgacttgaattgccaaacgatcgcccttgagtagtttgatatcagttcggtcggccgtcacgctaattttcaacaaccggccgcggaagttaatatggaattcataagccgtccattttttgggtagaaatggtttgaatgataattgtccttcatcgctaattcgcatgcctgcaaaaccttgcacaatcgctaaccaactccccgtcatcgacgtaatgtgcaatccgtcatcggtatcattattgtaattatcgagatccaggcgtgccgtccgcgcgtacatttccaccgctttatcttcgtaatgcagatcagccgctagaatcgcatggaccgccgctgataaacttgattcatgaaccgtcaacggttcatagaaatcaaaattacgcttcttttcagcagctgaaaaacgatccataaaataccaaatgccttgtagaacatcggcttgtttaatgtacggcgaacgcaaaatcttatcccatgaccaatgttggttgatgggccgttgatctgctgggattgcactgacaggctggatatctttatctaaaaagccatcttgttgaagaaagatcccgagttgttcatcttgtggcaggtacattttttcaataatcgcttgccattgtgagagttctgcatctgaaagtctcagatccgcttttttgttatcgcttacttttttgagcgtttcaatcgtataactaagcgtccattgcgccaataaattcgtataccagttattgttaatattgttttcatattcattaggccctgtcacaccgtggatcatataccgctgcgcacgttgtgagaaatggacacggtctgcccaaaagcgtgcaatctcagttaacacttcgataccttcattgagcaaataagtctcatcgccggtgtaacgtgtgtagttataaattgcataggcgattgtgccattgcgatggatttcttcaaatgtaatttcccattcattatggttctcaatcccatcaaaggtcaccattggatagagcgcgccttttaacccctgttgccgggcattgtgttctgcacccgacaattgattatgccgatacttcaatagattcaacgacactttcggatcagccaatgagagataaagcggcattgcaaaaccttccgtgtcccagtaagttgcaccaccgtatttttcgccagtgaatcctttaggaccgatatttagacgctcatcttcaccataaaaggttgaaaaaagttgaaataaattaaagcgaatcccctgttgggcactatcatcaccggcaatcaccacgtccgccatctgccaccgtttcgcccattgattcgtctgtgccgctaataattgctggtaactttgttgcgcaacgacctgcttgatacgttgcatatttggtaccaagtccaactctgaataatctcgagaagtcaccactaccgctcgtttttcaaaattcaattgcgttttaggggccaattgctgtttaaaacgttgcccaacttggtgggcttcttgaagcccagtatctgccatcattgtcgtttgatgatcaatttgaacccccacactaaaccgtggtaccccgaaatcgttgggcattgtttttccgaccaaataagtgtcatccgcagcgtctgactgctcaatcacttgccagaattgctcaccgtaattcgcatcctcattttgaacatcagcatcgatcatagaactaatctcaatctcaactgcttcgctcgccaagttttcaacagtgtagcgcaatgcgcataattccttttgaacgatactaacaaaccgctctatcgtaacttgcacttgtttattatttttagtaacgatgaattggcgggttaacaccccattatgcatgtcgagtgccaacttaaatgcggtcacttcatctttgcctaaatccaccgcttgaccatcaattttaagattcgttttgatgaaattgatggcattgatcactttcccaaaatagtcaggataaccatttttccaccagccaacgacggttttatccggataccagacgccaccgagataaatgccaggcaggctgtctcctgaataatcctcttcgaatacgccgcgcatccccatgtaaccattaccgatactcgtcatactctcttgtagccgtttatgtttacgatctagttgatgcgtgacaatctgccacggatcgacttcaaaaattctctccatttcgttccctccgatacgtcagccaaaatcattccgcctatttagcagcgcttaatagattgtttcttccgttgcaatgtcgaagtagtgtgctttagacatttcaagcaccatctcaacccgatcaccaggttcatgataatcccgcgaattaacttcagcgataaaatcggtttgtccaatctttgagtagagcattgtgttagcccctaataactcggaaacgacaacctctgccgttattttagcatctgggaatgtttggagggtaatttcttcagcgtgaatatcttccggccgaatccccaagatcacttgttgaccatcgtagccaccggcaataagctgtttcaactgaccttctggcactgcgatatttagaccatcgtcattcactagatgcccattagttaaggttaccgtgaagaaattcgttgctggtgaaccgataaagcctgccacaaacttattaaccggatgattatagagttcagttggcttgccgacttgctggattttaccatcgttcatgatgacaatccgatcagccatcgtcatcgcttcaacttgatcatgcgtcacatagatgaaattacgacctaagcgttgatgtaattgcgcaatttcagtccgcatttgcacccgtaacttggcatccaagttcgataatggttcatccaataagaacaacttagcatcacgaacaattgctcgtcctaaagctactcgttgccgttgcccaccagaaagagaagatggcttccgatctaaatactccgataaacctaagatttctgctgcggcatcaacccgttttttggtatcttgcttatcattcttacgaatattaaggccaaacgccatgttatcgaagactgtcatatggggatagagcgcatagttttggaaaaccatcgagatatctcgatccttaggtgcaaccttgttcatcactcggtcgcccattttaaattccccatcagagatatcttctaaacctgcaatcattcgtaaagttgtcgatttaccacagcctgatggcccaacaaatacgatgaattcaccgtctgcaattttcaaattgaaatctgtgacagaattggtatcatttcctgaatattttttattgatatgatttaaattaatttcgaccatcgatcatttctcccttacttcgtttttaactggtgcaccgttcaataattgatagctaatgaaggctgccaacgaaacgctcgcaacaagaatcataaacgcgagttttaaaaagacattaatgcccatcaacaagatgaaaacgccggtggctagcactaatttgcccccattggcaatgataaagccgcctaaggtaacatcatggcgcgctaacccgaccaagtagcttctggcaacgacaactagcaataacgccccaaaccagaccaataagccgctacgaactaaaatatcgcctacactggcttttagtaacaacacgatgatcatcaatgccgtcgctaacgtcagattcactaaaaagtctggcagtgcctgccgccacccttttaacacaacgcgtgcataattaccatcaccgttaacttgccattggtctaccgctctaaaaaccgcgactaaacttggtagtgtaaacaaactgagcattaacactagcacaactgcaccgggaatcattactcggccgtttggcatactaaacgttaaaatcagtgtcagaatgacaggaaaattaattccaaaccaagcaaggttgatggtaaaaagcgaccataaccaattcccggctgccaataacgtttgtcttgtttcgctgtgctttttcacgatcaacacttccttaattatttaacggcgccatctgtaacacctttgataatccatttttgagcgaataagtagaagacaatgaccggaataatcgacaaggtaatgccggctaatgcgaggtgccattgtttcgtgtattctccgaagaaattaaacatttgtagtggaatcgtatattgcacttgtggtaagaccaatgatggtaaaagataatcgttccagatcgcaatgatgttcaaaatagcgaccgtcacagtcattggactcaacattggtaagatgatcttgtaataaatttgccaccgactggcaccttccatttcagccgcctcatccattgcaatcggaatacttgaaagggtgccttgatataggaaaatcgataaactacagttgaagcctaaatacatgaacatcaagccgtacatattcaacagatgcacattaccgaagtttgccgtcaacggaatcataactgattggaatggaatcaacatcgctgagatgaaaagcagcaataaactgctactcaacttcgatttattccgttgcagtgcataggctgccattgaagaacagaggataatcagcaacacactgcagactgtaataatgagcgaattggtcaatgaactaatgaaattcaatgctttaaacgaatctccatagttcacattcgtgaatggattaggcagcgacaatactgaggcaaaaatgccttttggtgttttaaatgagttcgttagaatcatatagaatgggaataaccataaaagaccaatcaatacaccgaggacgccgatccaactatttcttttcttattcattagaaatcgccctcccgtttacggttataaaagacttgtactaaagaaatcgcagcgacaatcaagaagaagaccattgctttagcttcagcgagtgcgaaatcactcgaattataggctgtattcacaatatccatcgccaacatttgggtcgagttgtaaggtcccccgttggtcaacgacaagttttgatcgtagattttaaacccattcgacagagttaaaaacatacagacggtaaatgctggcgcgatcattgggaatgtaatccgcgtaaatcgttgccaagcagatgcaccatcaatttcagcagcttcaatcacttcacttggaatattttgcaagtaagcaatatagataatcatgatgtaaccactcatttgccaaaccgtcacaattaccaagccccaaaaaccggttagtgaattcgttaaccagttttggaagacagtcatgtgtaaggcagatcccaaagcgctaaagccttgcgtgaaaatgaattgccagataaatcctaagattaacccaccaatcatgtttggcataaagaagatcgctcgtaaaaaattgttgcctttaaatttctgtgtaacaagtaatgctaaccccaagccaattacatttagcaagatgacggtcacgataacaaaagctaccgtgaaccaaaaggcgtttccgaatgctttatcttgtaataaggccatgtagtttttaaacccaacgaccttagtaaaagagagtccatcccagtcagtgaatgaatagaataggccctccagcattggaatgaaaacgactaatgctaatgcaacaagggtaggggttaaaaataaccaaaatgataaactcttatttttcatttcaataccctctttttgttttatccaattgaataaatttatttagtttgttgttttgtccaaccgtccttcatatttgaaacagtcttttgccaatcttggtcacctgatagatatttttgtaggttaggttgggcaacgtctggatcccatgatgtgccagtataacccgggaaaacccagccgaatgttgctttcttttgactgtaatcatagaccgattgtgtgagtgcatctggcatcttcacatcaccgtaacctttataagcaggtacgaaatgtaatttctcaacaacgtcttttttaccttctttagacgtatatagccagttcaagaagtccttagctgctttttgttcgtcggtactcttccgtttattaactgcccagtagattgaggtcccaacaggcatcttaccttgttgttccttaactggcattggaatcatgccgatcccgtcttgagcgaatttcgcatcaatttggttaacggtttcgtaaatccagtcgccttgttgaatcatcgcaacttttccttgagcaaagttttggttcacttgtcccgcgtaatccatttgcatgactggttgaacggaatattctttttgcaaatcaatcatttgtttcatttctgcattgttttcaaacttcattttctttgaggtatacaatttttgtgcattgccatcaaattctttacttagataaacattcaacaaatgatctgaaagaatccatgattccttaccaggtaaagcaaagacccctttaatgcctaattgttctttttgttcatttaatgttttaacagctgcttctaatttatcgtaagtcgttaagctctttggatcgataccggctttttcgaagacagctttattataaacaaaaccatagccttcaatgttaaatggcaagccgtaaactttcccttgtgacttaacagtatctagtgtgcttggaatagcggccttagcagcttttgtatctgttaaatcagccgtgtagttcttgaattgtttaaccgatgctggcccatctaaactaaaaatagtaggtgcattcccggatgaaattctcgtcttcaaaacgggattatactgtgtcccaccaccgattgatgtgatttcaatcttgacgtttggatgtgctttttcatacttcttcgcaatcgctttgaattgcttgttggattccacttttccttgtagaattgtgattttcacattgccgccatccgcactcttgctcccacaagcagccaatgttaacgttacaccagccaataacgaaactaaccctagctttttccacatctttttcactataacgacctccaataaatttttatcagtgctgtttacaagttttattgtcgtactttgaaagcgcttttgcaaatgttttcctgatgttaccggtaacagttttcttatgcttattccgattgttcttttagcacagggcgaattgtcccgcccatttcaatgtttggttcgaatatcaatggtcgctcaatccactcctgattaattttcttgaggatattctctccgcatgcacggcccatttcaatgatggactgcttaatcgttgtcaacttaggagaggcaacttgatttaaaaagaccccatcaaatcctgtaatcccaaactcttgcggcacatgaccaccacacgacgcaatcccccgttcaatcccaattgccagacgatccgtggcacaaataaacgcagtctcgagtttgaattgcgcccagtgttcaatgatgtaggcttcggtcaaatgactatggttgttaaaatggtgtaactgaacaggacgctgctgctcatgcattaattgtaaataaccggcttcacgtgatttttcaaacgcttcttcactcgccattccaatataaataagctggcgataaccacgctctaatgctaattgcgctgcaaggtaggtccccaactggttatttgtatccacataatcaaaaccgtactgattctccccaaaaacgacgactggctttgtcagatcgcgaatccatgcaacatcactttcacgcaatcccgtaataatgtagccatcacaattcccgatatcaaagttacgccgagttactaactgcagcgaatactgatgtaggtcaagtgccttagcaattccgaccattagattcatgtaatatggttcggtaacgtcgatgtcttccaagatacacaatttgatgattcgggtactgttgctgactagggctttggcaattaaattgggacggtaatccaattccttcattgcggcatacaccaattccttcaattcatctgttacttgttccggatgattaatcacccgcgaaactgtcatcttagaaacgtttgcccgcttagcgacgtccattaatgttgccatttctccaccccttaagttcaactttttatattctttcacaattataccaatttatgcataaaatgattacgatttaccttattggtattaaaaaagcccatcatctaaagatgatgggctttcccttttttattctataattgcttgatttatctgccgtaagtgctccaagtccgttgctttgatgccagtatgcttagtaatatctttttttagcgctttgtacttgcggaggccttcttcagttgcttctaaccaaacattccgttggtcattttccatatcacgaattttgcgaataaactttttactttgtagcgtattgattttacgggaagccgctggtgcggaggtcccaaatacgactgcaatttggcctggggtgttccgtcctagttccacaatctgttccaacacgagaaattgatcataacttaagccatgtttttcgctcattttattcaattgagtcgtgatgttctgacactccagataccactcactaattgttaatattcttttattatctggcatctgcaaccctccaccgttcattcaatatagttttaacttatgtacaataaatgaccaccggctagtcaaaagccgacaatcatttatttaaaacaaactagcggctcatttcaacttgattaagcagcagttaaggttagtttatatcattgtttggttatgtgcaagtatatttcacgcgacgataattgccaatcgttcattaaaaaccttttaaaaccaatgtttgagcgatgtttttcggattattttaatttgtagataaatttacgaattttctgaaaacgccaataagaacctttgatgcgaaggggtcacaactcatgagttatgacctagtttatttttataaaaatcaacaattaatgccgataattcatttgcgcaactattttatttttcgtctatccgttgctacaattggtttttggccacaaaaaaaacgaagttcagttaattcacgaacttcgttttttgtgttaaacgactggatatttattttttaaatagtaataaaaaggcaatccgagtaatgtaattccgattccgattaaagttaacatcgtctgtgtgaataatgtattcaccacgatgaaaatcccaccaagaatggcgatgactggaatcactggataaccaagtgtgcgatacggacggtttaattctggttcacgtttgcgcagaatgaacacagcgataaacgttagaatatagaaaatccagatgacaacaaccaacatatcagtcaatgtattgaagccacccataaacatcataacgatggcgatactaatttgaactaaaccactgacaaccggcgcgcctgttttagaaagggagcgcagttgtcgactgaatggtaaccgattctcgagcgccatcgcataaggaatccgcatcccagtcatcgtgtagccgttaatcccgccatagacggaaattaaaatcccaatagtgatgattttaccacccacaccaccaaatagcactcgagccacttctgaagccgcattcggattgccggcaatctgattgattggcaacacaagaacgaagacggcgctcactaagaggtagacaaccatggttcctgttaaaccaattaaaattgaccgcggcaaatcgcgttccggatgcttcaattcacccgcaatattcccaacgtgaatccagccatcatacgcaaagagggttgctagaacaccactgcccagcgctgacaggaaactccccgatccatttgaccgggtcacgtcaaataatgacacatgaacggcgttgctgcctggatgaattaacccgaatacaataataatcgcaagcgggattaatttaaagacggttgtgaaggattggaatagtcccccaacccgggaaccaaagaaattcaagattgttaagctgagtccgacgatgattgcaattggaatctgccagtaagctgaccaactgaataagttaatgcattgcgttgcaaaaacaatcgacaacgccgcaatgttcgctggaaagtagactgttgtttcggcccaacctaataaaaatgccgctaaactaccataagtatggtcgatgtaccgcatcatcccgccagtttctggaatcgcagctgctaattcagcagctgtcaatccagcacaaattgtgattaagccgccgacaagccatgcaagcattgtcagcccggtggagccggtcgcatgcgtcacaggatccgctttaaagaacacaccagcaccgatgaccgttcccatcacagtggctaatgccgcggtaaatccaatcgtttgatttaatgcttgtttttccgtgggcatcttaaccgcctcctaatatcatttataatatttattatgacatgttgaaagcggtctttactagtctaatttgcaactaaattcggatatgtgcggcggaaatcttccattgcaccaatcaagttcgcatcattatgatactgacacgtccgaatggttggcatgaaaggcgcaatatcgacttgcttgagtatttcctgtaaagctttttcaatatttggcaccaagaaatcggcctgcgacaccccaccacctaaaataaccgcttctgaatcaaaactatattgtaaattatagatggcttgtgcgagattatcatagagcacctgtgcctccttttgcgcgagtaaatcgccttgatcagccaattcaaaaacttcatgccctgagtagttagtatgtgcctcttgattataacggtcagccatgtgaacggcggtcccgacttcacttaaaatccgaccatcattcatcatcatgtagccaaactcaccaccgaataaatggcgaccatgttggacttgtccgttgacaatcactgaaccaccaacgccagtgccaattaccatgaacaacacattttttagccctttagcagccccactaccgacttcggctaaagccgcgcaattcgcatcattttccattacgactggtaagtcaaaacgcgtttcaagttcatcttgaatttcaaaatgatgaatataagggagcgcactggccccttcaataatacccgtcgccttgttcactgcacccggcgtactcattgcgaccccaacaacttggtcactagccttaaactccgccacaatctgcgtcagcacatcataatacgcattcaacgactttggtgtggcaacagccccttgtttggtcaattgttgcgccgcaccatcccataaaccatatttaatcgtagtgccaccaacatcaagtaatgctaaatttttcattcgtcaatcccccaatcgattctcttatgtattttgataaccgcttacattctaccataaaattacgctgggcacccacaacagtgttaattattggcgtacacgctaaaggcgaactttggtttttaatggctttcatggtacacttaacggataaggtgggtaaccacccatttcacatcaaaggagcgtcaacaacatgtcaactaacgtttgtttaatcgcaatcacaattgaataatcatgtggccattttgcggctatttctgttggcattcgctttttaaatttaattaactgagggctgtgacaaaagaatatttttgccatggccctttttttcaattgaaacgtgctccaccaggcatctgctctcggttagctacgtcagccaaataaccaacaaatcggtttttcgtctgcctatgctaatcctcagcagataaccgccggtgccacactcttatcttaaacgtgctttcttcaaatagtcgtctgcgtttagcgccatctcgtaaacaatcggcgttgccgctcatttacgagatattgctaatcctcaacggctgaccatttgaagacgcactctcacaaaaaggagatctcatggaagaaacttatatgcaacctaaaaaggttttaatcactggtgttagtcaacgccaagttaattttgactatacaatgcgcgaactgggcgaactagcccgtgccgataacttagaagtcgttggtgacgttcgccaaaatatcgaccaagctaatcacgccacttattttggtaaagggaaggttcaagaaattaaagaacgcgccgtcgctgaagatgcggacattatcttgattaacgatgaactttcaccttcacagattcggaatttagaaaaagaactcggaataagcattcttgatcggacgcaattaattcttgaaatctttgctagccgtgccaaaacaaaagaagcgcaactccaagtggccatcgccgaagcgaaataccaattaccacgcctccatccttctgaaaacaagttggatcaacaaggtggcgggggtactgcgaaccgtggggcgggtgaaacccaacttgaattggatcgccgactcatcgaaaaacggattacgaagctcaaagccgaacttgctaaaatcgatcaacaacaactcgtacaacgccgtcaacggacgaaaaatgcgattccagttgtcgcactcgtcgggtacaccaatgcaggtaaatcaacgactatgaatcgaattttacaacggttgaaccccgatacacctgaaaaacaagtttttgaaaaggatatgctctttgccaccttagacacgagtgtccgcgaaatcgtcctccccaaccaacagaaattcctgttgagtgatacggttggtttcgtcacaaaacttcctcatcacttaattcaagcctttaaatcaaccttagctgaagcagcgagtgctgatcttttaatccacgtggttgattactcagatccaaactacttggacatgatggaaacgacacaagaaacccttgaatcactcaacattaaagatatcccagtcatcgaggcttacaataaagctgatttgaaaccagatacgcgctatcctgaagtagacggaaaccaaatcgtttattcagctcgcgacgaagtagcaatcgatgcattgattgccttaattaacaaacaactctttgaacaatacccaacgctcgacttcttagtcccatacacagaagggcaagctgtttcgtacctcagtgatcgtgccaatatcactaaacaaagctatgaagaagatggcacgttgattcgtgcacaaatcaacccagacctattaggacccgttaaaaagttcgttcaagcatagccaagcgctactttgcggcaaacaaaaaagcccatcgtgaagtgaacccccggtattggaccaaaatccaatatcgggggtttttatattgactaaatattctaaaacattgaaggtaaaagtcgttaaggagtatctttcatcatcgttgggttataacttaatatcaaagaaatatggcattaaaagtgcttccttagttgcttcatgggttcaaaggtataaggcctttggcccaaaaggacttgatattctaacacctaataaaatatttgatggctcatttaaggtgaatgttttaaaatggatgaaaacgaataaggcttcttatcccaaaactgcactttattttaatatctcaaacgttgggactatctggcaatggcaacatatttttgagactgagggtgctgatgccttatatcgttccaaaggacggcaaataattatgtcagcggataaacaatcaaaaaaacggcaacaaacagatctagaacgtcttagagaagaaaatgaattattacaaatcgagaacgaatacctaaaaaaattaagagccttagtccaggaagaagaagacaacaagcacaagtcatccaagagctaaggcttagacataaattagtaaaaattctaaaagtagttggtatggctaaaagtacgtatgaatatattattagtcatgaaccgaacggttcatctgaccggtctgttaaacatgccatccaaacaatcaagaaggatcatccagcttatggctatcgccgtgtaactggtgaattgcatcgtatgaatatcttagtaaatcataaaaaggtgcttgtcttaatgcgcgaaatgcaattactatctaccgcatttaacaaacgtactcgtaagtataattcgtataaaggaaatgttggcactgttgctaagaacttaatcaaccgtcgattcttcactgatcgtccttatcaaaaactagcgacagatgttactgaggttcgttggggagccaagacaattgatgaacgtgcctatttcacatgtatttatgacctattctcaggtgaaattcttagccatcaaattagtaaacatccgactgttaaatttacaacaactgttttgaatcgggcggtcaagaaaatccctaaggatttagaataccggacaacaattcattcagaccaagggtttcaataccaacatcaagattggactaatatcttgaaagaacatcgcatttttcaaagtatgtcgcgcaaagcaacatgtttagataatgcgtcaatggagagtttctttcatattatgaaagctgaagctttctaccaaaaagaaaccgacacttatgaaacgttagtttcacagatatcggtttggattgatgattataatttttcaagaattaaaacaaaactgggttgtaaaagtccggttgaataccgaatttttacaacccagaaagctgcttaaagtttcgtccaatatttggggttcacttcatcgacataaatgtcgatgggcttttttcaatttcttattgatactttctgaaaaccttatctgaagctgcttttaagctttgaatttcttttgaatcaatatttattgttagctgtgtagactcttgagcataagccgctgcaatctcttgcaaaccaactaatgctttccgactgagcgtcacatagctttgtggaatctcattatcctgaacgaataataataaacctgcagcttttaaacggtcgatatcattttctgaaaccccgattgaatgaagggtttccaaatctgcgcgttaatcatcggctagttgcttaattcgttgtaatagcgcggcttcatcaagattaaactcaactttttcgcaaatcatatctagcgtttcaaaatattgcatgctagcaacactagcgtgcaatgtattgataatttcatcgactgttttttctggttttaaataataaatcgtcattttattgtacccactatttttattaggattaaaacacttacttgattgccttaattctataacatttgtggatgaataaaatgcgtatattttaaatagtttaaaaatccggcgaaagataaattaaaaattttacccgtattgtcaatctaagtgcaacagtttctagtctaatcctataagtggtacacagcttagagttccggcatcagttccgccgcactccggtagcccaagatacgacgaggccggctgttgagtgcgtcctggaagctctgaatatcaatgatgtcgtaatggtggagtgagcgacctttcggaataaactctcgtagaaggccgttctggttctcatttgttccgcgctcccatggtgagtacggatgagcaaagtagacatcagttccttctactgaatctagttgtgcgaactcactgccgttatcaaaggtgatggtggtgaagtattccgcaccgtaatcatcaatgatggactgaagtcccaccttacaggtacttgctttgtagttagcgagcttgatgatgatttcgaagcgactcatccgctctgtcaaaaccagcaacgcaggttcgctatcaacgcgcttacctttcactaaatctccttcccaatggcccccttgccgacggtcttgaacttcaatgggtctttcatcaatcgaggtaccaagcttcgtcttattggtgcgggtatgggaatggcttcgtttaattcgcaagctgggtttgcgcggtaagtcgtgggtccgtagttcgaatctaccggcctcaatatcccggtaaaccgttggtgttgaaggaacaacctcgtctgcgtgttcccgtttgaaggtgtgcacgaagctgtccacactgtgtacgcgtggacgttgcttgatggcagcggcacaggcggcgtagaactcggggttcttctcaagcatcgtcttggggcgacaccactcccgccgctgagcgtgcagataagctgccgtatcagcaaagtaaatcaacgctaccttatgcccgggaattcgctgtagaacggagccacgagtgatctcacgcgaaatagtactacgagagcggttgagttcgcgggcaatccgtgcttgggagaatccctgattgagcagagtttcaatgcgaacgcgatcaaaatttgatagttgttggtaagccttagagatggtacgcttgatgttggtcatgatgtgcctttcttatgtgcttggttgcttataagaataggtcatcatggcctttttggtctatttaattatgtgttgcacttagattgtaaacgcgggtcttgaatataaagatatagattggctcaagtttgagcagatgacaccagttttttttggactttctccgaaattggagaaaagcgtttgtatcaaatgttttgagtagcatggaattttccgttgtatctttaggggctctaaaatctctaaatgaggttgcacaatttttcgcagactatttgaatcaaccattttgagtagggccgaattttcggccgagttaatactagatgcccccatttttggggagatgggaggtcttaacctgggggaccgaaatggtagtttagaacctgtgccctgaatcagggcggtggtgtatgtgatggattttctatacccgacaacttggcggatatgaaacaagctactataacgtatcgtcctgttaggctaaaaagggatgtccaaaattggacagacctatttaataaatacagttgtaatttatgacataaaaaactggtagttgctatggcctatgtttaatctaggtcgttgaatgatttaatttaatgacttagcatgagcactagcccaaattaaaagacggccaataatatgaccgtctgttgtaagttatgtatatgccccgtgcgtttatttttgttgaatacgtgaatacggttttgaatacggtttgtcgtattcactatgaataacaatctatttagagaaaataaaaaggctgatatatcaatgcctaagcacgtctataccaacctatcttttataaatgatgcgtcacccgggagtcgaacccggatctcaagaaccggaatcttgggtgctatccattacactagcgacgcattccgcgtactcaacagtacaatatattatattagcggagttaagcggaaatttcaagtgtaaattttgataaatcgcgataaatcaacgtttaaaaaatattcggaaagaaaacgtattcatcaaccccaaagcattgcatctgttttctgcacttgttataatggtcttgttcaaaaggataagttactagttttagtaagttgccttttattttttgccaaccatgggtcgactaatgacacagatggacattttatgtcccacggaaagtaggcgatagcaattgcgcgatgaattatctgcaatagaagcggttgcgccagatttcgtcggtatcattaagaaacgttaccaggtgttacaacatatcgattggctcgcgccagttggccgacgaacgcttgcggaacaactgaagatgagcgagcgagtaattagaactgagacggattttctgaaagcacaaggtttgcttaattcgtctaaatcaggtatggttttaaccgtgaaggggaatgaaatcctcgatcagttaagacaagtaatggatcaattcttagggttacatcagactgaacgtcagttgagtcaagtcttaggcattgaacattgcttgattgtttctggcaatagtgatgaacaaccaaaagtcctcaccgaaatgggcaaattagtcaatagtacgttacaattattattaccacaagggcaaagtattgtggcagtgatgggcggaacgacgatggctgaagcagctcatgaactttcaactgatctatcgaaacagcgcaatctaatctttgtgccagctcgagggggaattggtgaaagtgttgatattcaggccaatgcagtctgtgccgaaatggctaagcagacaggtggtaagcatcgggcattgtatgtgcctgaacaggtgagtgagaagacgtacgcgcctttgttagaagaaccaagtgttcaagaagtgttaaaactgattgaacgaagccggggtgttttacacagtattggtgaagccattgcgatggctgaacgtcgtgagatgccgattgaaaccatcaagatgcttaaagaaaagcatgcggtgggtgaagcctttggttacttcttcaatgcacaaggcgaagtcgtgtacaagattccgcgaatcggattacagattcgtgacttattgaatattccgtgtgtactggcggttgcaagtggtgcttctaaagcccaagcaatccaagcgtacatgcaccttgcacctaaacagacgtggttaatcacggatgaaggtgccgcaaactcgattttacaaggggcaaccctttaaaataaaaaatttttcatttcctaaaggaggaaattctattatgactacaaaagtagggattaatggtttcggacgtattggtcgtttagctttacgtcgtatttacgcaacaaacagtgatgtattggaagttgttgctatcaatgatttaacatcaccagacatgttggcacacttattaaagtatgatacagctcatggtcaattcaaccacgaagtatcagctacagaaaacagcatcgttatcgatggcaagaacattccagtttatgctgaatcagatgcacgtaatattccttgggttaagaatgatggtgttgacttagttcttgaaagtactggtttctacacatcagaagaaaaatcacaagctcatatcgatgctggtgctaaaaaagttcttatctcagctcctgctagtgctgttaagacagttgtttacggtgttaatgatgacacaatcacagctgacgataacatcatctcagcagcttcatgtactacaaactgtttagcacctttagctaaagcagttaacgatgctttcggtatcaaagctggtacaatgacaacaatccatgcttacacagctacacaaaaattacaagatggtcctgatcgtggtggtaacgtacgtgctgcacgtgctgctgctgctaacatcatccctcattcaactggtgctgctaaagctcttggcttagttgttcctgacttgaagggtaaacttgacggccacgcacaacgtgtcccagttatcactggttcattgacagaattagttgcaactcttgacaaagaagttacagctgacgaaatcaacgctgctgttaagaaagttacagaaggcaaccaatcatttggttacaacgatgatcaaatcgtttcatcagatatcattggtacagaattcggttcagtattcgatcctactcaaacacaaatcgttggcggtggcgcaggccaagttgtcaaagttgttgcttggtatgacaacgaatcaggctttactgctcaaatgatccgtacattagaaaaatttgctagcttaatctaatttcacttttgtgaacttaggaatgcgatagcattttataaggcgggaggaggtaaactccttccgcctttttttatgaaaatctaggaggtttgtccacatggcaaaacaaacagttgcagatttaaaagatattaaaggcaaaaaagtcttagtacgtgttgactttaatgtaccaatcaaaggcggcgttatcggtgacgataaccggatcgtagctgctttaccaacaatccaatacatcatcgacaatggtggcaaggcaatcttactttctcacttgggccgtatcaagagtgacgaagataagaaagaattgacattgaaaccagttgctgcacgtcttggcgaattattaaacaaagacgttgctttcgttgcttcaaacgaaggcaaagcattagaagatgcaatcaatgcgatgactgatggtcaagtattggttatggaaaacactcgtttccaagacatcgacaacgactttggcaaacgcgaaagtaaaaacgatcctaagttgggcgaatattgggcatcattaggcgacatgttcgtaaacgacgctttcggtacagctcaccgtgctcacgcatcaaacgttgggattgcaacagctatgaaagctaataacaaacctgcagttgctggttacttattagaaaaagaaatcaaattcttgggcgaagcagttgacgctccagaacgtccatttgttgctatcttaggtggcgcaaaggtttctgacaaaatcggtgttatcgaacatttattagctaaagctgacaaagtcattgtcggtggtggtatgacttatactttctacgctgctaaaggtttatcaattggtaactcattagttgaagaagataagatcgaattggctaaagaattaatcgaaaaagctggcgacaaattagtattgcctgtagataacgttgttgcagacgcattctcaaacgatgctaagacagaaattgttgaaggtaacattcctgatggctacatggcattagatatcggacctaaagcaattgctgacttcgaaaacgtccttaaagatgctaagactgttgtttggaacggccctatgggtgtgtttgaaatggacaactttgctaaagggacattggcaatcggcgaattcttaggtaacttatcaggcgctacaacaatcgtcggtggtggcgattcaacagccgcagttaagaaattaggcgttggcgacaagttaacccatatttctactggtggtggcgcatcacttgaatacctagaaggtaagacattacctggtatcgctgctatttcagacaaataatttaaaattaagaggagattttctcatgcgtaaaccaatcattgctggtaactggaaaatgaacatgaacccaactcaaacaactgagttcgtgaatgctatcaaagccaacttacctaagtttgatcaaacagaatcagttatcggtgcacctgctgttgacttacctgctttattagaagcagctaaaggcacagacttaaaagttgctgctgaaaactgttacttcgaagatgctggtgcattcactggcgaaacttcaccaaaaacattgaatgaaatgggtgttgattatgtcatcatcggtcattcagaacgtcgtgattacttccacgaaactgatgaagatatcaataaaaaagcacacgcaatcttcaaaaacaacatgacacctatcttctgttgtggcgaatcacttgaaacacgtgaagctggcaaagctgaagaatgggtttcaaaccaagtaacagaaggtcttaaaggcctttcagctgaccaagttagctcaatggtcattgcttacgaaccaatctgggcaatcggtactggtaaaactgcttctgctgaccaagcacaagaaatctgtgctgttgttcgtcaaacagttgctaagttatacgaccaaacagttgctgacaaagttcgtatccaatacggtggttcagttaaacctgcaaatgttaaagaaatcatgggcaaagaagacatcgacggtggtttagttggtggcgcaagtatggaacctgcttcattcttagacttagttcactttaacgactaatttttaacgcattcctgtttacgaatggcgtaaaattagctaaaatagatgtaggctttgcctgacatccaaaaaagcgctaatgcttaacattagccaaaaaaggagaaaattacatgtcaattattactgatattttaggtcgcgaagttttagactcacgtggcaatcctactgtcgaagttgaagtttacacagaagatggcggctttggtcgcgcaatcgttccttcaggtgcttcaactggtgaacatgaagctgttgaattacgtgacggcgacaaatcacgttttggtggcaaaggtgttttaaaagctgttgaaaatgttaatggtcctcttgcaaaagaaatcattggtttcgacgctacagatcaacgcggtatcgatgctgctatgattcaattagatggtacagaaaacaaaggtaaattaggcgctaacgcaatcttaggtatttcattagctgctgcacgtgctgctgctgacgaattaggcttaccattgtacgaatatcttggcggccctaacgctcacgtattaccaacaccaatgatgaacgttatcaacggtggtgctcactcagataacaaagttgatttccaagaattcatgattatgcctgttggtgctaaatctgtacgcgaagctatccgtatgggttcagaaactttccaagcattgaagagtcttttatcagctgacggtaaagttacttctgttggtgatgaaggtggtttcgcacctgacttcgcaaacaacgaagaacctttacaatacttgatcaaagctattgaaaaagctggttacaaaccaggcgaagatatttcaatcgctatcgacgttgcttcatcagaattatggaacaacgaagacaagacatacaaattacgttggtcaactggggaagaattcacaacacctgaattcgttaaataccttgaaggcttagttgctaaatacccaatcatttcaatcgaagatcctatcgatgaaaacaactgggaagactgggcatcaatcactaaagaacttggcgaaaaagttcaacttgttggtgatgacttcttcgtaacaaacactgattacctacgtaagggtatcaagatgggcgctgctaactcaattcttgttaaagttaaccaaatcggtacattaacagaatcattagaagcaatcgaaatggctaaagaagctggctacacagctgttgtttcacatcgttcaggtgaaactgaagatacaacaatcgctgacttagttgttgctacaaacgctggccaaatcaagacaggttcaatgagccgtactgatcgtttagctaagtacaaccaattaatgcgtattgaagaacaattaggcgatacagcttcatacaaaggtatcaactcattctacaatatcaaaaaataattgaatatgttcgtgtcggcacattttgaggtttaacagcccgcgttaaaggattatgtttgtagtcttttgacttagggggttaccattgaatatggcgagcaaaacatatctagtaagagcatcttttaattaagatgctctttttttgtgcgataaattgaccggataaggtaatggattggattaggctagcaactaaataaacaatccccagcataaccggttgattaagaaaagcttatggagcattgcgcaataattaccagaataatcttgcaaataattacgtttgcaagcggatacataaacattagactatagatagcgtagagggattgaaacgaggagttgcgataagcatgaacaaacgagaacacgctattattcaatatagtttggcccagcataaaacgtactatgtcgacattgccgcacagttacagctttcagagcgcaccattgcaaccaccttgaatgatatcgaaagagccctttaatgtgaaactcgttcgaaaaccgaatgacggtatttattttaccggggatgtcgcgacattagccaatcatcttgaaaaaaaggccaatgatcgtccccaatccaaggaagaacgctgtcattgcattctggctaaattattattaggttcagcatcgattacgattcaacaactttctaataccctatacgtgagtcggagtacagtcgagaatgatttgaaaaaggtaaagcaaaaactcgcgcaattcggtcttcaattggcaatcacgcataccggtttatccttaatcggttctgagcatcaaaagcggcaagcaacggtggagttaatcagtcagtattggggaaaacggactgaggctaaagagttaaatggacagttagtgcgccatgttcaattaccggataatctgaatcaactgtttgaaccagccttgattaaaaacatactcacagctttaacggaattaattgaaaaaagtacgctatcatttactgattacgagtttcagtcgttagcgattcatctgatgatgccagcaccaactggtggaagcaatggagcccaaccagtggtgacaccgttcattgccgaaacacagctgttagtacagattttagaacggcgatttgaattgacaattccggattttgaacaggaatatctcaaccgtcatttagtaacggtccaatcgaaggatacatctgttcaaactatccagaccgagttgcggcaatcagtcgggctgccacaactattacggcaacagcttgctcaattagcagttgatgaggaattaattcaggggttagcagttcatttaagttcggcacttcgccggcttgcaatgggattgagtattaataacccatatactgatgaaatttgccagaattttacgcaagcctttgatcaagcagtgttactaaagccggtgcttgaaaatcagtatcagattcaaatgaatgaggacgaattagcctttattagtttacactttgaagctttttttgaacgacattcagaagatgcacgcttgagtgttgtggtggtttgtagtagtggcattgggacatcgcaattattagggcaacggttggccaaaacgtttgctcaagaattacggattactcgtattattgccttgggagaactacttgcaaccccgattaaggaatcgctagtcatcagtacgattgcgattaaaggtttgtcagtgccggtgattgaagtcagtcctttgttaaatcggcatgatattggaatcattcgccagatgattactgaacaaccgacgcctaccaatcacttagtagctttattgcaacccgaactgacaattgtcacgcaagagcagttaacggatcaaggcgcaattgaattaattggtcagcggctcattgatcaagggtatgcaaagccaacggttgtccaggcagcgctggcccgagaagctttagcaagtacggcacttggtcgagtagctttgccgcatgcggattcacaattaattaccaagccagccattgggttgctgattgcaccccaaagtattaattggcaacacaacgacaaagtgcagctcgtcttctttatggccttgaacgaaactgttcatggccaaatgcgggcgatttatcatgatttagaccaattgattgaaaccccccgtcttttaaagcaagtcgcacaagcatctgatgggacggctgccctcgccatcttggcacaattgaatcagaaaaattagaatggagtgttaccagatgaaagaatttgatgttgaaaatatttttacagatatcgttgttggggatgataaaccgacggcattagcaacactagcgcaattatttgctgataagaatgggttagatcgggttgcattaaccgcgggattcaatgcgcgtgaagctgagagcacaactggttttgggaatggggtggcgattccacacgcgaaagtggcgggattaactcaaccagttgtcggaattgtcacgtttgaaactggtgttgattgggaagcattagatgacgcaccagttgaaatcgcgattgccctaattatgccgctcgatgaccctaataagacgcatttaaaagtgttgtcgaagtttgcgcgcaagttgatggatgacgcttttattcataatttgaagcaaaatcggcatgatgcaatggcactctacacgttagttaacgatgaaatcgaatttaactaggaggatttagaagatgaaaaagtttgttgggattacaaaatgtccagttgggattgcccatacttatatggcagctgaaaaactgcaaaaagccgggcaagctcgcggatatgaagttaagattgaaacacaaggcgcttcaggggtagaggatgaattaagcgccgcagatgtggctgatgccgatttcgtgattattgccgctgacgttgccgttgatggggaagaacggtttaatggcaagccagtactatatgcgaagaccgctgaagctattaaagattctgatacactgattgaaaaagcactaacggcaggcatttatggcaagaatcagccgaaaatagaagctaaacaagaggacggtcatgaacaaagtccaattattaagcaattattaaatggggtttcccatatgattccgtttgtcgttgtcggtgggttgtttattgccttgtcaatcgcgattggtgggcatccgactaaagcaggaatggtgattccaccacataccatttggagtagtatgaatcagattgggacgattggttttaccttaatgattccaattctcgctggttatatcgcttatgctatttcggggcgtgcagctttagcacccgcaatgatcggtgcaatggtcgccaacaatacagacatccttggtacaaaagccgggactggatttattggtgcgattatcgttggttttgcggctggttacttggttaaatggtttaattcatggcccgtaccaaaagatttacggccagtgatgccaatttttgtcattccgttattaggggttgggattatctcagccgttttaattctcgttttaggcgcacctattttatggttgatgacggcactacaagatatgttaacggccctttcacaaaatccagaaacgggtgtgattcttggcgttgtgattggtgcgatggtcgcgattgatatgggtggcccagttaataaagtggccttcttattcggggtggcatcgattacggctggacatccataaatcatgggtgctgttgcttgtgccgttgctgttccaccattggcattggggattgcaacatttgttcgtcgcgatctttatacagaagaagaaaaatcagctgggattccagctatcttaatgggcttgattgggattactgaaggcgccattccatttgcaacagctaacccaaaacaagttttcccaagtatcattgctggttcagcagttgctagtgcagtcgggatggtcttcaaaatcaccgatgcagtgccacatggtggcccaatcgttggggtgttaggtgcaaccaataatattggtttgttcttcctctcaattttggcaggggttgctgttgcggtcgcaattttaaccacatttaaagtacgaaaagcacggaaagcttaatcttaaaagggcacacgagtaatcggcgctctttttttgtgggtaaaaaagttatgaacatgcgcttttttgaattatataaagcgctgtctatcgaattttgataaaaactggtataatagagccaattaaggtaaaaaggggtggcagtcgtgaaaaaaggagatcgccaagcacgaatcgaacaaatcattaatcagcaagttatttcgacgcaagaggatttattagcaacgttgaaacaagatgggattgatgcaacgcaagcgaccatttcacgtgatattcgggagatgcaaatcgttaaggcacgggatgtgaacggtgagctccgctatacgatttttcacgatgacgaacgcacccaaactcagaaattaaaagataaactgcgtgaagtggccttgtccattacacaagtgcaaatgttaaacgtaattaagacgctcccaagtaacgggaatttattagcagccttaatcgatgatttggggtacccagaagttgtcgggacgctggcgggtcacgatacgattgttatcattagccctagtgaggaactagcagccgaattaaacgaacgtttcgcacaacatctagcaacagcgagataagcaaacaaataaggcgttgcgacaaaagtaattttttgtcgcaacgccttatttgttgagctaaacatgttctgtgttaatcctcaggagatatccggctgataactcactctttaatctacatactggttaaaaatgtctgggatgggggctgttactgttctttgttcatccgtgaagggctctgtgtagcgcaacgtttgcccgtggagtagtaggcgctgtgttgaatcggttggaaagtacaacggatcacccaaaatgggatgaccatcagccgccaggtgcaagcgaatttgatgtgttcgccctgtttcgaggttgactgccaaggttgctgcaggtccttttcgatgcagtaattggtaatgggtcactgcggataaacctgtgatgtaatcaatcgtgcgtttgcgcttattgtatggatcgacaccaattgggaggttaatcgttgcatgttccaagagtgtttgttccggatcgttagcaatagcgatgtattggcgcgacattgttttttgactaagctgtcggtttaaaatgccgatgacgattggggttttaccaatcaagagcacgccactggttgcttgatcgatgcggtggaccatgtaggcctttttatcttgtttagcaagataggccgccacttggttcattagggtgaagttttcaccaggaccgttcggatgggttttaatccccgccggtttattgacgaccagtaaatcatcatcttcgtataaaacggaaaaagattgccgttcatcaagttcgtagtcttggaccttaacggaaacttctgagaagttcatcgtaatttgatcgccagcttcaacgtgtcggttgaaggcgagataatgtccgttgaccaaaatatcttgattaatccgcaagaaatgttgcattttttgcggcactaaccagtgattcagcaggccgcggacagacatcggactaaagtcgggcgctaaagtcacttttttttggtaaattatcattagagttcaaccacctttaagctattagtttagcgaaaattggtgtaaaagtaaattttaaaagattgttaatgtcttcgattggcatcagtgtcaattgacgaatatgctacaattaaacaagattaattttgaccgtaagaagagggatcgcatgaacaagcaagattcgccgttttggttggcgattaaacaatttatgaaacgcgtctggcgcgtgattcgttatgtctggtatcgactacaattgacgagatggctgattctcgctgttttaattctcattttcgcgatgagcagctggctcacgtttaaagcgaagacggctaacgtcggtgagattaaggccaacttacaaaccccaacggcgctttatgacattaaggatgaacgcgcggggacgttatattcgcaaaaagggacttatgtcgatcttgataagatatcgccgcagattcaaaatgctgttttgtcgactgaagatcggaccttttataccaatcatggattcagtattaaagggctagcacgagcagcagttgggttagtgattcatcatgggcagattaccggtggtgggagtacgattacccaacaactcgccaagaatgccaagttgagtcagaagcagacgttctcgcggaagtttgaggaattattcttagctgttcagattaccaaggtctattccaaacaggatatcttagcgatgtatttgaataatgcctacttcggtaacggggtgtggggcgttcaggatgcgtcaaaacggtattttggtaagaatgcgagtgaattagatgctagtgaaggcgccgtgattgcagcgatgttgcggagccctagtttctataatccggctgaccatttagataatgcgactgcgcggcggaacttaattctcggcttgatggtcgataataacaagttgacgcaagcacaagccgacgctgctaagaaagagcaacttgtcgtgacgaatacctacgagcagtcggatgggtatcgttatccgtattactttgatgaggttgtgaatgaagccattaaccgctttgggttgaaagaagaagacctcgttaagaacggatacaagatctatactgccctcgaccaatcccaacaaagtaagatggaaaccacctttaaacaaaattggttgttccctgataacgctgcggatgacaccttagttcaaggtagttcagttgcaattgatccgaaaaccggcggggtatcagccgtcgttggtggtcgtggtgagtatacaatccgtggttatagccgcattacacagatgaagcgtcaaccgggatcaaccatcaagccattggcggtttatacgccagccttagaagatggctaccactatgattcatcacttgaagataagaagcaaagctatgggactaaccactatataccaacgaacccggataacgtttataccggatcgatgccaatgtatcaggcgctagccaacagtacaaatgcgccggcggtttggttattaaatcaaatcggcctcaaacgcggcattaagtcggtcgaaaaattcggcatttcagtacccaagagtgaccaaaacttggcgatggctctaggtggttggcaaggtggggtttcaccttaccaaatggccagtgcttatacggcttttgcgaataacggtgaattgtctgaaacacattttattcggaagattgttgatgcgagtggcgccgtgattgttgataataccgaaccatccaagacacggattatgagccaaaaaacagccaaagaaatgactagcatgatgttgggcgtttataataatgggactgggcgttatgcgaaacccaacggctatcaagtcgcagggaagtctggtagtactgaagtgcctgatagttatggctttgggaccaaagatcaatggttagtcggttatacgccggatattgttgttgcgacttggatggggtatgacaagacggatcaagatcactttatgaagaacactagcattgacggtttagcaccaatctttaaatatgagatgcaacaactcttaccaaccacagcacagacggactttgatactgaagatgctcaatcgttggcgaaaaaagaacagagtgggacatcgaacgaattagtcgattcaattgaatcgggttttaaagatgggataaataaagcgaaagatacagccaatcaatggtataataatttgaaaggttttttcaattaaatacatggaaaaaggagtcagtacaatgacagttaatatttatgatgatgccaaccaaatggcaacgcacttgcaagaattaccacaatttttaggcttacaaaatgcctttgcagcattgaaaaaagacgatattgccttcacaatgtttaagaaattccaaacgcaacaaatgacacttcaacaaaaacaaatgcaaggtcaagaattaacggacgacgaaattaaagaaatccaagaacttgctcaaaaaattggggacatcgacgcaatcaagaacttgatggaacaagaacgtcaattaagccaaacaatggatgaattaaaccaaatcatctcaaaaccaatcgcagatatctaccaagcatagaatgcgtttgaaacgggtttggctttgaggattaacctaaaaatgagactgatggcgtattttgtcatcagtcttattttgtagttaactggaaaagtcagtttcaaaaagcacgtttcaaataagagtgtgactgattgcggtcagcaactgagcattaatacaaaaatcgcgttaatccaggttctaggattaacgcgatttttaaattaagcggaagttgttgcaaccagaagcacgtttcaaacggtgaatcgattgatttcgattcaccgcttttttattgcctaaaaacagaacgtttgttctaatcgcctttatcacaccgcgtggcaatggtataatgaagcttatctaagctggttacgaccggccaaaagaatggggtttttcaagatgaaatttatccatgcagctgacgcccatatcgacagtccgtttgtcggattaaaacaagcaccgacagcattgtgggaaacaatccatgcgtcaactttcacggcgtttaaaaaattaattcagacagccatcgatgaagccgtcgattttgtattattagttggtgattcatttgatcaagaagcgcagagtttgccagttcagaaatttttaaaacaacaatttgaacgtttggcagatgtcgacattccggtctatctgagttacgggaatcatgattactgggatgccaatcaagtgcattttgaattgcccgccaatgtccatgtttttggagcacaagtagagtcgtttgaactgactaccaaaggacatgagagtgtgaccattgtaggattcagttatgatcaacggtggttgtcagctgatcgagtggttgattttccacaacgtgccagcacaacttacacgattgggacgttgcacggtagtcaaaaagcaacggccgatacagatcactacgcaccatttacgattagtgaattgaacgcttgccattacgattattgggcattaggtcacattcataagcgccagattctccaagaacgaccagcgattgtttacccggggaacttacaagggcggcataagaatgaacctggtgaaaaaggcttttatttagtggataccaacgatggtcagttcgatttaacgttcaaaccaacgacggtcattgagtggcaacgtcaacagtttgaggtgacacctgacatgagcttaacgcaattgcaaacggctttgagtgcccaattgatgcaaagtgatcacgctagtttagtggcgctagagctaacacacgcggagcgattatcgagtgacttattgcaacggattaataatggtgaattattggcggtgttacaagaccaattggaaaatagtgaaccactgcattggccatacgcgttgaagttgcggtttgcagcacaacagcaatttagtcagattgaccaagcctactgggaacaagcggctgcagctatcttgacaccggacaatattctggaaaaagcaaagccgttaatgaaggaaaactttatccgggaagcaattgaaacaccagaatttcaagcggatctcaaggacttagtcacgacaattctacaagagaagaagatgggggattagccatgcgaattaagacagtcaccattttgggcttcggtaagtggcatgatcagacgattgatttgaataccgactatcaagtcctttatggtcaaaacgaggcgggtaagacaacccttacagcctttattaaaggcgtgttattcggctttgcgaccgctaaacaacggtatgaacaatatgtgcccaaaaacggcgcacaatacggtggtgaattactggttagctatcatgatcgcgatattgtgattcggcggctttccggtaagtttgggggcgacgtaacggtcatcgatcaaggccaagaatttggcgctgattacttagctgacctcttggcaccagcggatgaagctttgtttacgcagatttttgaaacgaaccaacaggatttaaatcagatatttaatctaaaacaggctgattttttgcagcatttattgacgattggtgcggtggggagtcatgagtggctcgactttgccaaggaactggataaggacagtcagaaaattttcaaaccctctgggcgtaagtggccattgaatgttgctttgaagaattatccagagttagtgcaatccgttaacgaagctagtcgtggttatcaagaatatgaaacgaacgcacgtctattgcagagtaccgttgcgacaatgacggaacaccaaaagcaagtggctgaattaaaacaacgccaagcgcagttgcaacatttgcttgatcgttggccaagttatgcggaatggcgagcacttcaaactaaacttgaaaaggcaacgccgtttgacttaacgattgacgagcaataccaagcattagtggtcgaacgagaacgcaatgcaaaggcgttagcagaagcaaaatccgaggtagcaactgttcaagaaacattggatcaaacaggtgaatttcgattttatcaagctaatcaagagacgttggtgccattgtttgaacaattaaatgaacagcaaaaacaaattcaattacttggattacggcaaaaccaaagcgcacaactcgctagcgaaaaagcccaattagcagcgcagtatcaatggcaaacggatcaactaccaaatccgttgacagacgagcaacgcgcacaactagaacaagccgaagctgaaatgaatgaggcaaccacgaccagtcaagtgctgaccaagcaactggctgatttagaggcgcaattagccacgcaaaacgcggcagttagtcaggttgaaccacaagaaacgccaacgactaatggacgtgccagtcaattgagtatgctgattggcgtagtcatattcatgattggtcttttcttgccgggcgctctgaaagtcattgcggtcgctggactggccgcacttggctatggtggttacatgatgtggcaaaataaacaatctgaccatgaccaaccagtgcaaaaacaagcttggcaacaagcgctcgccaagttggatgtgttgcaggctgaaaagcaaaccaagacagctgccttacaagcacaacaagcaatattgcggacgatgcacgaacaaagcgcggcattgttggcgcaaactggctacgaaacagcgatgccaatcagtcaagttttagcgatgcagcatgctttaagccggatgactcaattgaccacggcactcaaacaacaacaagccgataatcaagcaatcgaagcggcactaaatacgtattgggatgcgtttgcttttgcccgtgattgggtgggggtgttacagggcagtcatgaagagaacttgtcccaggtgagccaattcaaagcccggattacccaactcacacaagaccttgcacaaagcaacgagagttaccggtattatcaacaacaagtgacacgcttaacagatacgattaaagaacaagacgctgcacaaacagcattgctagcaaaggctaacttaacaaccgccgcagaattagccagttgtgttgccaatgagcaacagcgccgtgctaatgaacaacgtcaagctgatttaaaacgcgaattggcaacggacttgtcggctttacaagcaatcgctagtcaagaacagcttaagcaacaagccgctcaaattacagaacaagtggcaagtttgacaagtcagttacaagaacagcaacaagctgttgcgcaactacgcgtgacgcaagcgcaacttgtcgataatgacagttatcaacaacagcgacagcgacaattacaagaacaggctaagattactgatttagcccaagagtggctcgctaagcagttagcaattgattggattcaagcgacgctgaaggccgcttcacaagaacggttcccccgtttattggaaaaggcaacgcagtattttgcaattctaacccagaatcggtatattaagattaacttcgatgacacactgatgacggttttacgggcggatcaagtgctttttgaagtcggtgaattatcacaggggactgcagagcagttatacattgcgctacgctttgcgtttgcagaagaggtagctgacgtagtctcattacctttattggtggatgatggctttgtcaactttgatgatcaacgccaaatcgccgtttggacattactccaacgactcagtgtggccaaccaagtgatttatttaacggccaatccgcggacgcaagcgcactttgaagcggatcattggttaaatctagaggaagtggggctgacacatgacagcaaagaaattatttgattaccaaaacgacgagaatctggatttatttgtactaattaaaacggcggacgtgcggattgctaaaaacggcaagcaattcatcgcgtttactttccaagatcaatcgggacaaatcggtggtaaatactgggatgcttctgatgaagacgttgctaaatttacggcgggtcaggtgatccatttacaaggtaagcgggaattataccaaaataatccgcaagttaagatttataaactgcgcttaacgacgggggacgaaccgcaaacagttgaccagtttattcctaaagcaccggtgcaagtaaccgagatgcaagacgaatttggcgcgatgttattcgaaattacaaacccaaattggcaacgtttggttcgacatttaatgcaaaaacatcaagcggaattcttcagttttccagcggctaagaccaaccaccacgcgtttagtggcggcttggcctatcatacactttcaatgttgcgcttagctaagacgattgctgcccaatatccacaaattgatgaggcattgctatatgctggtgttatcttgcatgatttaggtaagacgctagaattgtccggtcctatttcaacggaatacacggttcgtggcaatttgatcggtcatattgtactggttgatgaagagatagtgcgggcttgtgatacattaaagatcgacgtgaatgctgaggatatgttgctattgcggcatgttatcttggcccatcatggtttaatggaatatggttcacctgtccggccacaagttcttgaagcagaagttctgcatcaaattgatgaattagatgcaagtatcacgatgatgacccagtcattacaacatgcggaagcaggtcagtttactgaacggctcttcgcaatggatgggcggcgtttctatcgcccagtcgaagatcctaatttagatcaaccaacagaataaatgtacaaaaagaaccccgctgcgacagcagcggggttctttttgttaatgcttatttagatgatgattttgaagctttgctgttaacgccgtagcttgaaaggatgtctgataaatctttgtccttgatagatacgttagcgttcttaagtaccttagtgatgactttgttcatcactgtttggtctttaagccatgaagcgtaaacgatgtctgttaattctttcttgtgatcagccatcttacctttaccagggttcttgatcatccggataacgtggtaaccataagttgtcttaacaggggttgttgtatattcgtttgtctttaatttgaaagcagcagtcttgaatgttgagtcaagtgatgtatcagtactatcgaagacaggtaatttaccgccatctttctttgtaccagtatcagttgaatatttcttagctaattcgttgaagttctttgttgagttgtcttttgcaagtgcatcaatgacttcttgagctgtttctttcttttcaactaagatatgttgaacttggacttttggttcgtatgatttccattgtttcttcaagtcagcattggttacttttttgttatcttttagtgctgcttgtgttaagtattgtgttttgatgctgttcttaaatgatgtaggtgtcatactgctttgtgcaagcacagagttgaatgatgaaccgtattgttttttgtaaccatcataagttttcttaacttttttatcgatggcttttgagccgtattggttttcaagcgctttttgcaagatcatttgttgcaattgttgcttgccggcagatgtttccttgatttctttatagtattcgtcttgagtgattttaccaccctttaggcttgcgatagtcttgctaccacaacctgctagtgaaactaccattaataaactagcagcggctaatagccatttcttcattgtatgacacatccttatcaaaatatttatgaataaattcgtagtgaattcaccaattaatataacacataaactaactaaattgaacgaagcgtctaaaacttcacagaactttcaaatttaggttttacgctaaaaacgcgggaatcgttgatatacttaaccttatcgcttgcatacaatctaatttttggtgaatttatttttttaagttttgtgtcaaacgatcaactgattcttcgatttgagcaattcgtggtgctgcttcaaatgaaaatgtttgcaatgcatcactgataccaccaagtgatgtgactgcagttgttttgagttcatttgataaattttgcgaagctgtttgcaattgaacagcactttgttgaacatcagttgaactttctgagagctcgtttaaatagcgggcaatcgcttgttgtcgtttggggccggttgtagaagcagtgagaagggcataagccgtccctaataagccaccaactagtaatccttttgaaaatgacatgattagtcctccaattgtgcgtgaataccatctgcgatcgcttgtagttggtcagcagtgtaatcagcgctattatcaccgaattgcattgcaaatgaatcatccgctgtgtaacgtggaataagatgaatatgagaatgaaaaacggattgataagccaccgcaccgttattattgcagatgttcattccttggatggctggattgctagctttaatagccttagcaatctttggaatgcgactgaaaacggccgcagctaaatcagcatcgtattcaaagatgtccgccacgtgttttttgggtaccaacaaggtatggccgggtgtcacttgtgtgatgtccaagaaggctttgacatcgtcgtcttcatagaccactgtgttcggaatttcatttcgaacgattttgcaaaagatacaatcatccattaattatgcctactttctcttatttgaagtctcaatacagcttaatgctatcataaacaagggcttttcgctactgccatcagctttgtaagcggatggaaaaatattgagtgggggcatacactcgcagtttacttcgtgttaagatatgatatgaaaaaggattcactaaaaaagtagttttaaaaaccaaaaaacgaggctattgattatgagtttagagattaaccaattaacggggggctacgcgcacgtccccgttttaaaagaggtcagctttactgtgccaaacaatcaagtggttggtttaatcggtttaaatggggccggcaaatcaacaactattaaacacatcattggattattgacaccacaaaaaggcacaattactttagacggtgtgacgttacagtcgaatcccgaccaataccgccaaaaagtagcctatgtgccagaaacgcctgtcttataccctgaattgactttaaaggagcatttagaattaacaatgatggcttatgatttaaacgttgaagagacgtgggttaaagccaatgcattgttaaaacgattccgattagacaataagttagactggtttccggttcacttttcaaaagggatgcggcaaaaagtgatgatcgtcaatgcatttatgacgaatgctgacttgtttatcatcgatgaaccttttactggactggatccattggcaattcatgatttattagaaatcattgctgaaaaaaaagcacaaggagctgcaattctaatgtcgacccatattctcgcaacggcgcaacaatatgctgattcatttgtgcttttaaatcagggtcgcgtacgaacgactggcacgcttgaagaattaaaggttgaatttaacatggctgacgccgatctcgacgatatttatctgcagatgacgaaagaaggttaaccatgcaagcattatggcaaaaacgcgtgcaaaaacatattcaagaacaagtgaagtatttgcgcctcgttttcaatgatcatttcgtgattgcgattatctttttattaggagcgttgggctacacatatgctaacgccgtcaaaggactggatccacgagcttggtggctaaaacctgtattgagtttagtattacttgcggcagttagttttggccgcttagcaacattattaaaagaagcggatagtgtcttcttattgccaaaagaaagtggccttgtgacgtatttgaaatcagcacgtttatatagtagctggttaccattaattgcaatggcttttgtgacgcttctagtggcgccactcttgttaattactaagacggtcccggcatggcacatagccgttgccttgattacattggtaatcatcaaagaccgccgcttttcaatccagttgcgtcagtggtaccaagcggatgaaacccaggcaacaaaagggctttcgttaatccttgatttggcaataattgccagtcaattatatcagtggctaaatttagtcggagtgcttgtagcgcttggactagcctattatcagcgacaacaattggcgcgtgttcaaaagacacagctattcgattggttagcggcagttggtgcagaagattcacgaatgggacgaatttaccgcctctataacctcttcacggatgtgccagggctcagtagtcaggttaagcgtcgtcgctatttagatggcttattaaagccaattacagctaaaccagccaatacttacctctatttatatgcgcgtggctttttgcggggcacagaattcagcgggttatatatccggttagttgttttagggggcatcattctgtgcttcagtcacatatggtggttgagtttggcactcggacttctattgatttatctagttggttttcaattattaccgttttacaatcagtatgatcaaattattttcactcatctatacccagtaccaacgaccaaacgaattcaagcgttcagccaattaatgcggactttattattgcttcaggcgttactctttagtgtcattttattagtgacactagggatgacgattcaagttggtttaagtgttttagcattgttcgtgctcgtgattggctttgttcaattctatttgcctaaacggttgggggcatagtccctgtgacacgcatgctttcctacttgacgactactggctaattattatatgatacccttagttattagacagttgaagcaacgtgagcgctgtattttggcgctttattttattgaagaggagtcgaggctgatgaattttgacctggatactggctggcaagttcgtccggccggtggtgatacgggcgctgcatttttaggcgttcgcgcgtcagaaaagattttcctaaagcgcaacacatcaccatttttagcggcgctctcggcagaaggcataacaccacgcttaatctggacgaagcggatttcgagtggggatgtcttaaccgcacaagagtggctcaacggccgaaccttgaaacgtgatgagatgaatagcccacaagtcgctaagttattagcacgggtgcatcaatcccaactattgaaacgaatgttacaaaaagttggcggtcgtgtctggtcagcaaacgaaatgttgcaagcctatttttacgacttaccgcaagatttacggcaacacccatttttagaacaaacagctgattatttgaagcaaacgttacgtcaattacaagcaccttctgcagaggtgtgccatggcgatttaagccataagaattggttgttatcggatattaatcgactctacttagtggattgggactcggcaatgttagccgaccctgcagtcgatttcggaatgattttatttcaatatgttccacgtcaagaatggcacgagtggcttgagaactacggcctagaggtgacgcctgaattaatgatgcgcgtcaactggtacggcagtttgaacctactccaaagcattaagcaccattatcaacgtggtcgttttactgaaatgaaccgtgacatattgcgcttagaagcagtgatttctgaaataattaataaaaattaaatgccaaaggttgggcaagtgtccaacctttttgattggcatcaacaaggagaacataatgcgtttaagaaataaaccttgggcggcggacttaattgcggccaaccccagcatgattttagtgagtccggaagatatcgccggcaagtggcaaacacgttttgccaaagaacaacccatttacatcgaagtgggttcaggtaagggccaatttatcactcagatggcacaaaaatatccagaccggaactttatcgcagttgaaatccaagaatcagcgattgccgtcattttacaaaaacaagttgaattgaaattgccaaatctccaattattattgggtaacggcgcagccttaacaactttctttgctgaaaacgaagtggcaggggtgtacttaaacttctctgatccatggcctaagacgcgccatgaaaagcgccgattgacatataagtcattcttagcggaataccaacaaattatgcaaccaacgggctacttacgtttcaagactgataaccaaggtctattcgaatactcattgatgagcctgaatgattatgggatggtttttgacgacatctcactcgatttacacaatagtgaacttgcagaagacaacatccaaacggaatacgaagaaaaattcagcaagcgcggccaagtgatttacagattagaggcacactacaagtagagtgctttcaaagctggtcagcacccgagcaatagcctagtctggtgaataaccaatgcaattggttgtttgccggacgtagctatgcacagggtgctagctttgaaagcacgttttagataagagtgcacttgacgctcggtcagattttgagcattaacataggctggcgaatgagtgatataatcgctaatttgacaggtgtagttaggcgcagaaatctagcgtcaatagcacgtttcagcaagagtgtttttatcacacgggttgcctttgaggattagcctaagaaagggattgatgggggttctttaccatcgattcctttctgtagctaaccggaaaagacagtgtgataaagcacgtttcaactcaaaaaggtacgttatccagattttatctaggatagcgtacctttttaattataatattggttgaaacgtgctccgcgcggtatgttcctgcggttagcaacgtcagtcaagcgaccaataaattggtcactcgtctgactaagctaatcctcagaacgtgcccaccgcgctgcgcactttaaatttgtgagaattcaatcacgacgccggttcttgcgtctaccttgaatcgaaattggtttgtaccatcttcacgctcgcagatgatgccaccttgatagactggaaaggtccgtttgttttgtgagaataagtggggactttcttcaatccaagaacccacaatctggccttcatgttttaagccggctttaacatcttctaaaatttggtttaatttgatcattctttgttgcgcccgatattgcttcgcactggcagccgccgccagcgcaaaaccgatgccggttaataaatatttaaacgtttgcccattttttttcaaagaaaaactcctcagtcgtttttgtctttaaatagtatagcataatttttggtcctaaggagtggacatttacggacaaaccgcttatattaaaacgagtagtaaaattgaaggggtgcataatgaaagaattagcagcgatgacagatacgaatctgactcatctgattactgaagggaaacatgttttattttttacagcaacttggtgtagtgattgtcggtttattaaaccagccatgccagaaattgaagctgaattcccggaatacgactttattgaaatcgatcgggaccaatttatcgatatttgtgaagaatgggaaatctttgggattcctagctttgttgtgattgataacggtaaagaaatcggccgttttgtcaataaagatcggaaaacaaaacgcgaaattactggatttattcattcattgaactaaccttgaaggagtcattaaatgttaattgcaagtatgaaccaagcggcttttcccaacatcttagtggtaatgacccaacctgatgttgaaaagcaagtgacaactgaaaaacaatcaatcgtacggattagtgatcaggcagatcaaaccatcggctataatttcttagcggtgaatgagttattgcccgatttacaattcaacggtgttcaaacactaactgaacagcaagttgctgttttaaatgaagcacttgtagcagctggtttcaccggtgatttagtggctgatgaaacaccacacattgtcgttggttatgtccaagaatgtgatgtgcatcctgattcagaccatatgcacgttactcaaacacagattgcacctgatcaaaccgttcaaatcgtttgtggcgctgctaatatcgcacaaggacaaaaagtgattgtggcgacggtgggcgctgtcatgccagaaggtaaaattatctggcctggtcaactccgcggtgttcaaagtgacggcatgatctgtgcagcccgtgaaatcggggttgctggtgctcctgctaaagggattatggtcttgccagatgattgggaagtcggtcgtgaagtgacagcagatgcagtcgcagccctactaaaataatccatcttacgattttgttatgggattattaaaattaaaatagtatgataatagatagcaattaattggttaaagacaaaccctttaattgttatttcgttttgcagtcaattaagcagtaaaacacaaaagaggggttaaacatatgtgtgggattgtcggatttgctggtggattatttgatttaccaaagaaaaaagaagtattgaaccaacaaatggacgtcattaaacaccgtggaccaagtggtgatggtgattttatcgatgataaagtcgcattaggctttcggcgtttatcaatcattgatttagcaaagggtgatcaacccatttataatgaagaccacactaagctagtctttttcaatggtgaaatttataattatcgtgaaatgcggactgaattgatcgcacttggtcacgactttaaaacagattcagatactgaaaccattttgcatgcttacgaagaatggggtaaagaggttgttacaaaattgcgtgggatgtttgtctttgtcatctatgacttacaaactaagcaattatttggtgctcgtgatttcttcggcattaagcccctttattacacgactttagcagatgggactttcatgttcagtagtgaaattaaaactttcatgcgccatccagaatttaaaccagaactaaataagacagccttaaaatcattcatgatgaatcaatacaatgatttacaagaaacgttcttcaagggtgttttcagattcccagcaggccattatttcacttatcaagatggccaattggacatcgaaaaatattgggatatgtcatttaatccttcaaacttatctttcgaagaagaagtggctaagattgatgctgcagttgaagaatccgttaaagcccataatgtggctgacgtaccagttggggctttcttatcagaaggggtcgacagtagttatgtcacaagtattttgcaaccgcaagaagtcttcagtgttgggtttgatgatcaaacctataatgaagtcacagcagcccgggcgcttgccgatgaattaggcttgaacttcaatgaaaccaaagtgaatgccgatgatgcgtttgctgaatttgacaaaatccaatattacttggacgaaccagatgggaacccatcatgtgtgccattatggttcttgtcacgctttgcccgtgaaaaagtaacggttgccttatctggtgaaggggccgacgaattattcgctggctatgtcaactacggcatgcactcccacaattcaacaattaaggccttcacttctggcttgaagaaattacctaagggtgcgcgtgccagtttagccaaagccgttaagaagatgccagccttcccaggtcgcgtccatttatacacgaatttggcgaacccgcgtgaattctatacgggtcaatctgtgatttttgatatcgaaaatccaagtatttttggggcagatgaagccaatactttcttgaaacctgcttatcaaaatgatggaacgattcaagcaaactatcaagctgattttgataacgttgcggatgctgatccagtctcacaaatgcaatatatcgacttacatcacttcatgttaaacgatattttgcaaaaggctgataagatttcaatggcgcacagcttagaattacgcgtgccgttcctggatcctaaggtggctaaggccgctggtgaagtcccaactaaatacttaattaatagtcatgatacgaaatacgcttatcgtcaagcttctgctaaacatttgccaacagcttgggctaaccgtcctaagttaggtttcccagtgccaattaagcaatggttagaagatgacaagtattatgaaaaagtcaaagcactctttagcgaagatttcgttgcagaattctttgatcaagataagttattggccttgttagatgccaataaagaacaacgcattaacggccgtcggaagatctggaccatctttaccttcttaacatggtataaagtctacttccaaaatgtcgaagattatttagcattaggctagagtgtgacctatagaatccgtttaagtgcagccacaaaattaatttttgtggctgctttttttgcgttttagagatcaatcaattgataacagagaaaaataaacattcattatttagctcaaacccgcattatggtaaactataagggattagtttaatcatatagataattgtgatttattgaaaagaggacgtttaaaagatgataacaaatgatacagtttaccattttgttgggattaaaggttcaggaatgagtgctcttgcacttgttttaaacgacctaggctatcaagtacaaggctcagatatcgatcaatatacgtttacacaacgcgatttagaacgagcaggaatcaaaattctgccattctcagaaactaatttacacgaaggcttaacggtgattgccgggaatgctttccaagatgaccaaattgaaattaaaacagcccttgaaatgggcttgccagtcgttcgttatcaccaattcttaggtgaattattgaaagactatacaagtatcggcgtggccggtgcgcatggtaaaacaagtacgagtggcttattagctcacgttttaagtggtgtggctaagacgagttacttagtcggtgacgggacaggtaaagggattaaagatgcacaattcttcgcatttgaagccgatgaatatcgccgtcatttcctagcttattcaccagattatttaatcatgacgaatatcgactttgatcaccctgattattacacaggcttagatgatgtgtttgacgcgttccaatcagaagcttacaaagttcaaaaagggatttttgcttggggtgatgatcctgaattacggaaaatcaaagccaatgtgcccgtctattattatgggacacgcgaagatgacgatttccaagcccgcaacatccaacggacggtgcaaggttcagaattcgatgcttactatcatggcgaaaacatcggccattaccacgtcccactttacggtgaacacaatgtcttaaacagtttagccgtaattgctgtcagtcatttagaaaaaattgatggcaaagaagtggcacgcgaattggcagacttcaagggtgttaaacgccgctttacagaaaagaaagttgctgacgtgacaatcattgatgattatgcgcaccatccatcagaaattaaagccacattggatgcagcacggcaaaaatatccagataaacaaattgtagcggttttccaaccccatacgttcacacggacaattgcgttaatggatgattttgccgctagcttaaaccttgcggatgaagtcttcttaacggatatctttagttcagtacgtgaaaaagctgggaaggtttcaagtgctgacttaggtgcgaaaatcactaaaggtggccgcgtcttgaaattagacaatatgtcaccgctcttagacttcgaccaaccagtcgttgtcttcatgggcgctggtgatgtgcaaaaatacgaatatgcttacgaagaattattgagtaatttaagtcctaaagataattaagatttaggcattttgattgtctttctggatggatttgttacaatattcctaatcgggtgattatgggcccgtttagaaatataagaggtgaatattcatggaagaaagacgcgttgtgaatgtcgacagcgaagcccgctttttcagtaaagtgtatggtttgatggctgtcggtgtcggaatttcagcactgattgctgttttaatggtgactgtgtttaaagcacaaacttacacaatcctatcaagtggtagctcgtggatggtttggggcttgatgattgcagaattaattttagtcgttcagattagtcggcgttcaatgaagaatccaacggcctcgttagccatgtttgtggcatatgcggcgttgaacggattgacgtttacggccgttttactggtgtataacattggtgaaattggggcagctttcgcatcaagtgctttagtgttcattgccatgtcgatttatggtcgcatgacaaagaataacttaagcggctttggcaagtttgcaatgatggggttaatcggtgtgattattgtctcattggttaacttcttcatggcatcagctgcaattagctacttcttgtcatacgctatgttaattatttttatcattttaacagcatgggacaatcaaaagttaagtatgatgtaccgtcaatacggcgcaactggtgaaatttcggtttctggtttagctgttatgggcgcattaaccttgtacttagactttgttaacttattcctcacaatgctccaaatttttggcggcggcagagattaagggtttgataacagtcgggatatgactgttatcaaacgtttcaaaagaacggtcatcaggtaaaactgatgggcgttctttttttatgcttgacacaatactatgcataatatagtattaactttcgaaagggtgatcggtttgaatccacaattaaagaaaggcctcttggaattttgtgtgttagcaacgcttaagaaagaggattcatatggctaccaaattatcaaagatacatcgagtgtcgttgaaatttcggactcaacattatacccaatcttgaaacggctcgaggcgcagggtgaaattgaaagttatcgggtcgaacataatggacgcttgcgtaaatatttccatttaacattggcgggacaagcatcgattgatagttttttggccgattggccggcagtgatgggcatttatacttacataagggagtgtaacaatgactaagaatcaatttattaaacagcttgcggcagaattaacgcggtatgggattagtgatgcagccaacacgattgattattacgatgaattaatcgatgatcgactggaagcgggtgaaacggaagcggagattatcgcgagtttagcaacgccagctcagattgtagcgcaattagctacaccagataaaccggttcgccaaaagaagatggcaccgatgttgattattttaatcagtatcttgttagtcttagggtcaccgttatggggcacgttgttattgaccgccatcatattagtggcacttggttatttcttgatttggttaggcccgtttctgggggcaatctttgctgctgccggcattcttggtgggagtgtcagcttagttttatcgttctttgttggcttacaagaaggctggataattgcggtgatgcagcttggaattagttttgtgatggttggtgtggggctgatttgtgcaggggcgacctggtacatgacgaaatacttaattcgtttctcggttggaatcacacgctggctggttgggatgttccgtagtcgattaaaggtggtggcgtagatgttgaaaaattggttgaagattagtttatgtatgattcttgtgggaattattttaatgaccgttagttttgggatggcggattttaaaagccaaccattccaatatcgtggcacacatgaatggagccggacgtttaacttttaagataaataaaaagaggtgccgatgatgataatcgacacctcttttgtttgttattgaccgttccatggataatcggtactgatattttgattgaaatgtttttgactttgaaaatttgcgaggcggtgggcttttcgttcctcataaccggcacagatgaaccgttcttccggtgattcgggttgaatgttaggaagggccggacctttttccatcgtgacaaaggttaagaaggcagttagcccgaggaatcgttcgccggtcttgagatgttcaccgataatcttagtaaagatttcaattgaacgggtgccgacaccggcaacgtaactttcgatgcacaaggaatcttgcattttgaatggttcaatgaagttcagttggtcgatactggcagtcacggtttcgacgcgcgctaagcggctagctgaaatggacgccgaaccatccaagagttcaagcaagcgtccgccatagaccgtttcatgttcgttcaaatcattgacgaagacgcgatggttactgatggagagggtttgacgacaggtgatgagatttgacattataaaaagactccttattaatcatttagatgggggacaatcagttggctagcagccaagtcgacttggtaaacgaatgcttgctcttcacgaatcgtcattcccatatcagtcgcgtagactaatagaccgagttgatgtcccgctgttaaatcataatgggtgggttgtaggtcgagcgtgatatcatagaattcgtttggggtgacggcgtcggtttgataactattgtggcgattttggagattgatgtgtcctttagtgatgacttgataattgcttggtcgattgagcttaaattcctttaaatcatcatagcgccactgatagccgagttgttggcctttagcagctaatacagcaggtgtggtgcctaaacggttgaattgaccatagtcaataaccagcacgctcaatagcccacgttcggcattgacagcgacccttgttctaaactgaattcgaccatcaataatgagcggttcggtaagcggggagcctaagaaacgcaaccggttgccagtgaaacttgattgatctgcgattaaggcatcttgccaagcggctgtactgattttttgggctctaaaggccgcaacaccgtcatctttaaaagtcgtcagtggggcattttcggtagcattagtgcttaatgtttgttcgtttagccagaaagtcgtagttggattgttaggggctagccaatccgcctgggtcgtccaagtggcttcttgtgcgttgtcttgaattgtaacagccggtaattttgtgacagcctgattctcaatgccgagtaattgatgcgtgaaccataagttcatcatatcggtgaaatcgatcgactgaatgttattcatatagatatgttcaccttggtgtaagaaaagcttcttattaaccggttgatcgcgcaataaatcccataaggcgccggcattttgtagtttaacgttccaatcatttaatccgtggactaagatgacgtcacaattcaggttggcgagattgtcacgatagttacgggctgcccagaaggcgttgtaattgcctgtgatgcgatcttgaccttcttgtagggctttgagttggtcggcgaagaaagtgccagagagcgcgtgatcagcggcatctttttggcgggtttggcacaacttcgctaagacgtcggcatcttcaccctgacaatcaattggggcgaccactaagccgttttcgcggtagtaatcgtaccaactggaaatggcggcttcagctacaatggttttcaggccttcaacgccagttgttgcagcagcagtggctaaagtaccaaggtaggatttaccagtcattgcaacttggtgattacaccaccaagctttaatttcaatgccatcggtgcggttggtgaaagctcgtcgattaccggctaaccactcgatgatggccgtggttgaagctgtttcttcaggtgagccacaagtccggacgccgtcggaaccgcgtgtgccaatgccgccagcgtaaacgttcgcaaatccgcgcgccagaaagtaatcatttaaactgtaattgctgtcatctgttgcgtttaattcagttgtcatacttgtgccattaacggcgcgaggttgaggaagcggtgcagtggttggcgtttgggttaaatcagctaagcttggttgttgaacgggtttagtcgcaattgtagtatcaacattgtgcaaatcagcatcgacgtcgttaatccccttatagtaaggactggcagtgtagagtgctggaatttttaagcctgcttcagtttcgcgtggtctgaagatagtcgtttctaataagtcgcgttggccatcttgatcagtatctaggctcgattcaacataaacgacttctcgaattaaatggctggtatcgaaaacgggctggaccttaccattgaagatgagaaattggggctgatcactttgccagtctgcaaaaaaaccacggttagccaattgatccagataaagtaacccagtttggctacgcgtcgttaataggagataaagggcttcgatgaaagtggtctgatcaaatgccgcttgatcgataaatgggagttttgtggcggccataaaagcagtgggttgatcaagttcaaaatcggttgtcatttcaaaacccaagagttggagggcgacattatagaagacaacttgatcgaatgaagtatcaatggtttcaaggtaggcggttagatttaattcggttgtggcttgtaataaactaagttgcccgctctgggttgattgactatgtgcttctgggaacagccgttgaaaaacatcttgggcaaggacttggaaggggagctgggtgaaatcctttgggagtaaatgaatacgctgtaattccgtgatttgttcagattgagatttagttaagcgtgcaaactgatttaattgcatgtttttccctcatttctgcgaattttaattgacagtgactacttcaattgcttataatatagcatgttgtgcggtattctgacagcaaaaaccgtcaatcaatgaggtcatagtagctcagctggatagagcaacggtcttctaaaccgtaggtcgcgagttcgaatctcgcctgtgacattcaataattcttggagacatctaatttcgcacattgcttgcgaggttaggtgtttttttaatgatggagtgaatgtaaaatacaagattatttaaaagcgcatcaaacatggttagttgatttttatcaacaacggaattggtatcggttttcaccattaattcggttgaacttcttgagtgaagaacttggggaattgtcacgggccgttagaacgattgaacttgggcgtgatcacccaggtgaaaaagttaaaaacgatgctgaaaagcaagctaacttaaaagaggagttagccgattgcttcgaccaactgctcattatctgttcgaaatatgaaattgagcctgaggaattgatggcacttagcgaggcaaagtttaaaaaacggttcgaaaatgattagaaattaaatatttaaataaaaagtttatgcgctttaaagcctattttaatagtcttttgcgaatgaattgcgagcgatttagtcgatagttttgggatgcgggttgctaattagaaaatgccatgctatactgttcaagtaatcaaattttgaaacgtaatttgagttttggatgcacaataccttcctcttttacctatcaataatttattgcaacaaaaaacgtacattgatatgtatcaggaggaaattattatgaacaacggcacagtaaaatggtttaacgcagacaaaggttttggttttatcactggtgaagacggcaaagacgtatttgctcacttctcagctatccaaggtgacggttacaagtcattagacgaaggccaagcagtatcatttgatgttgaagacagcgaccgcggtcctcaagcaacaaacatcgttaaactttaatatttgtgccccgcatccgcggggtttttttatacaatcaaataagtaaggacctgagacaaaaactgtctcaggtccttttttagtttagtggaaaataatattctcatgttgccactaatgataagcgattttatagtcccaattactctgttaaatactgtaacaaatgcttttcggcattatcatagttgtattgccgagcattgagtaacaccaagttgcgatcattatcaaaaaaattaccggtgctctgcgttagatcgggatggagtgctaagtattttccaactggcacttcagtatgcagcaatgtttgggaataatgcggtagctcatccgtgacattccctgggaaaaatgaattgaccgtaatctctttttcagccagaagataactgagaaagagggttaataaagctttatgggttaataaccaccttgcacgttgtaaagtagtctcctgttcttcgcaaatgctgagttgttgaatgatttgcggatcaccggttatgataaggacgcgaccgccagttaatcggtctgctaagcccattgttagctgataatgggggactaaattagccttaatattttcttctgctgagctggggaaaacaccggcagtgtgcactagaacgtgtattttatccactttatatttgatgcttgccagtgcttggttgcgtcctgatttggtcgctaaatcggcttggataaaaaaggccgcttttccaagttgggccacagaagcccggccttttgccgcatcctatccgatgataatgacttgatggccttctgcaatgagatctttggcaatgcgatagccaatcccagatgttccaccggttatgacaatatccatatgtgacagtcctttctttttcaaattattatttaagttgattgatttagaaatgagtgcatgagatagctattaagtgctttcgttaattaacttagggtcagtatatattaggctttttagagataccaattctttaactcgaattcgtgcaccatcgacggtactatagctattaacgatatgtcttttgtttaggcagttaaattgtcaaggtcctattgggttcagtatgatgaacatatagttaggattcgcattcatttcattaataggagggtgttgctaaatgattacaacgtataagaaaattttagtcggggtcgatggatctgacttagcgaacaaggcatttatggaagctgttgaagttgcgaaaagaaatgatgctgagctttatgtggctcatattattccaagtacagtctatgtttcaccggatgctagtgtctatgcgaagatgacggcgatggaaaaagatcgtgtgaaggagcaactagcggctaatattcgttacgcgaataatcatgggctaacgaaggtcaccccgattctggaagtcggctcaccgaaaaaagaaattgcgattcgcattcctgaagaatatgggattgatttaatcatgttggggattacggggaaaggggtcattgaacgaatgatgatgggatcggttgcccaatatgttagtgcccatgctgcaacgaatgttttattagttaaataagaacgtctggttccaaaaaagcggtcacgacattttttgtcgcgaccgcttttttgcgtgtggttagatgacaataatgtcactgttcaaatccaaaagcgtattgtacattaatattgtaataaattaatggatagattagaaatttcggagggacagttgatgtcaaaaaaagggcgtcaaattggtggtgtcattggtattctggtcatattcggtctggtagcgggcggaattgtggttcagcgacaacatcaccaacgagaagtaaaaatcgcgcaacaacaagccaagattaagcgccaacgacaagcgcaagaagcaaagaaacagcgcgaatcacaaaaagtcgctgctgctaaagcaaaggaagaacgacttaaagcagaaagccaaccgacaattgttgcagaacaagcgttagatgactacttaaagcaaattggcttttcaggtaccgcgttaattgtccgcgataagcaagttttgttggataaggggtacggcagtgctaatcgggccaagcagttggtgaatacgccagatacgctatatgcgattggttcaactgaaaaagcgttgattgcaacgagtttattgcagttacaagaacaaggaaagctaaacgtcaacgatccaatcagtcggtacctcccggactttccgaatgggcagcagattaaactgactgattttttacatcatacatcaggcattgtcggtcgggaccaagataatcagacgaagactctcgaccaattaatcgaagaaattattaaaaatgggattaaggaacaaccgggcaagtggcactatatggatgcgaactatattgtgctgacgaaggtttttgaaaaagtgagtcatcaagattacaaaacgtatctaaaagaaaaaattctaaaaccaagtaaaatggcgcacactggtttcatgacggatcaatattcgcgattaccagcggcttccattggctatctggcaaatggcgctgcgggacaactccccaatttcacgcaactaccaggggtcggagatatgtatatgacggcgactgatatgtaccgttttgaccgcgcgttgtggactggaaaattaattaatgaacagagtaaggctcaaatgttccaaccagggagtacgtcccactatggaatgggcttttacaatgatccagcactcattattaaccgtggttatttgtcaggctggaatgtgtcgaacggatttagccacggtggccgaatctatatcgtgttattttcaaacgaaaagaacgaaaaggtttcgctcagcaagatgaacggtgaattatatactaaaataactgcaacgatttaagggttttgttccttatttagttgatacggacagcgcaacgataaaatcaaacctggaagaactgtacaaagaacataaagaggataatttggttttccgaaatatttttttataaatattttttgaatatttattcaatctcgtttgacccgttatttcgttagcaatgagcttttctctcgctgacaacatagaatactataccaacaatccaagacatcgtcaagcgattgtttacttttttttgaataaaaatataaaaagtttcaaaagcgtacattgttgaatagatattcaccgattgtccgaactaattcaagtgcgggacactcgtgacttctaacttatccagtaatttcgtgaactcactagggttcgcaaatcgaaaaccggcttcactaattattctcaattgttcggtataaaaatcagtctcatgagctccccactgaaagacaaagaacgaaacgttctcaccttcaaggttaatattcgctaaattgatcaatctcaattcgttaacatcaatatttagctgtgcttggattgcaattaatacagcagcaagtggtgtttgatcatcttgcttattggtcaccagcatcttataagaagcatcaacttgtggttggaccaaaaaatcatattgtccttgctctgtcttatacataatcgttccggctactttagcactcatacattctcacccttattcaagtcttctatcgcttcttcagtccatcttggtaatcgttctgcaatgggcgcaaacccaatatgaatccggcgatttgtccaatagtgtttcttagcacgctgtggtgctaaatcttgtgctttatgtagcgcacgtaacgacaaactaatcttatgtgtgtattcatcgatatctaacactaatacatctaacacttgaccgactttaaactgttcatctaacgctttaacaaaaccatgaccacattctgagatgtggattaagccttggaccgttgcatctaatgaaacaaatacaccatatggttgaatgcctgttacagtacctgtaatcttttgtccaattcgataacccatattttcctccatttcaatattcctatctattttaagccttccagttagtaaaaggcaagctatcggctaagaccttttatacaattccttctataatatgtaaaaagaacctgaggaaacatccctcaggttctcatttaactaaagttgatcagctgctagtaaaagtgccccagtaatcccagcgtcatcccctaatgcaacatgcacgatgtagtcatcaaggtcaggcgtttgcacataacctgccatttgacgtttaaaggattcacgaatcattgggaatagttgggcttgtttcgacaccccaccaccgaagacaattcgttctggcgatagcattaaagcaatatttacacaggcttgagctaaatagtcagcttccatttgccatgcttgatgatcagccggcaataagtggcctttcttgccccaacggcgttcgattgctggaccagctgctaagccttccaaacaattgtggtgataaggacatgtcccttcgtatgaatcttctggttgttgccgaattaacatgtggccgatttcaggatggctgtaaccttgtaaaatctgaccgtgttcaacaacaccgccaccaatccccgtcccgacagttaagtaaacacaactatcaagtccatcagcagcgcccatcttcaattcaccataggctgcggcattcacatccgttgtaaaagcaaactgggtatcaggataatgagctttcattgctcctaagatatcatagtgttcccaccctgctttgggtgtatcgatgattgagccatatgtttttgatttcgggttaacatcaattgggccaaacgatgccaaaccaatggcatctaaatgatcgaattgatcaaaatattcaaataaccgtggcatcgtttgttccggcgtctcggttggcatactaattcgttcttgtatcccattttttccatctgttacggcacagacaaacttcgtgccccctgcttcaattccacctactagcatctaaaacacctcttcaattaaaattaatgattaatcgtaatgtgattgatgataacttcttcaactggtttgtcttgcattcctgtttctgtagcgttgatcttattaacaacgtccatcccactcaagacgtgaccaaatacagtatgtttaaaatctaaccaaggtgtaccacccttttcataagccgtaatgacttcttctgggtaaccagcacctggcatttgtgacaacatgttttggttgatatgctcgtttgttacgatgaagaattggctgccgttcgtattaggaccagcattagccattgataatgcaccatttaagttaaagacttcttggttgaattcatcttcgaaaggttggccccagagactttcgccacccatcccagtaccggttggatcgccaccttgaatcatgaaatcgttgatgacccggtggaaaatcacaccgtcatagtaatctttttcagctaagccgataaagttttctactgtcttaggtgcttggtcttggaaaagtgctactgtaaattcgccacggtttgtgtcaaaagtagctgttggccctgcaaagtttgcaaggtctaattgtggatatgtcatttaatcgtcctccttgttttgactcacaatcattatgatagcgaattgcttcataaattactacgattatttcattaaacatgctttccttatttttttctagtatactaatttaagaaatctactattaaggaagttatctcatgcttgattcaaatcatctctttgatatcaccattattggcggcggtcctgtcggaatgtttgctgcctattatgctggtatgcgcaaggccgatgttcagattatcgaaagtctccccgaactcggtggtcaagtcgcaacactctatccagaaaagcaaatctatgatgtcgctggtttcagtggtatctctggtgcacagctcaccgaaaacttaattgaacagctggcacttttccaaccaaccttgcaattatccactgctgtgcaaggtatcgaaccccaagaagatgggactttcgttcttaaaacaacgaagggcacgacacgcaccaaaggcatcatcattgccgttgggaacggggctttcacaccgcggaaactcgctgtcgattacgatccagaatgggaaaatcactatattcactacttcgcaaaagaaatggcgcagttcaaagatcaaaccgttgccgttgctggcggtggtgattcggccattgaatgggcactaatgctcgaaaaagtggctaaacaagtctatttaattcaccgtcgggatcaattccgcgggcttgaaagtagcgttgaagcactcaaacaatcaactgtccaaattaagacgccgtttttaatcgatagtttgaccgaagtgaaccaacaactcgcattaactttaaataagatgaaatcaaccgatcaagagcagctaacaattgacaaactccttgttaactatgggtttatctctgatactcgaattctccgtgattggggattaacattggaccaccatcaagtcgctgttaaccaacaactcgagacgaacatcccgaacatctatgcgatcggcgatattgctacctaccctggtaaagtgaagttaattgccagcggatttggtgaagcaccaatggctgtgactgagttactaacgaatctctacccagaaaaacgccaaccactacacagcacgtccattatgtaagagtgcgcaatatgcccgattaccttctgaggattagcctagtccagtaaattagcgacgcagtcgatgatttactggccgtagctaaccggaagaaggtggcttatggagcacgtttcgataagagtgctttaactagcggttagcttctgagtatagcatcggttagtgaatgagccgcacagccgaccgtttgcaaaccgtggctaaacggaagaagttgctagctaaagcacgttttaaaaaagccctgcatcaacgttttaaccgttgatgcaggactttttagtattttattaagcattattttttttcatttgactcttaaccgctgtgataaccatcggaatcaatgagaccccgataatccctaacacaacgagtgagaaatgttcacgcacaacagcaatgtttccgaagaagtaaccagctccgcaacagagtgtcacccacaagatactcccaatcacgtcgtaacggaagaacttcatgaaggccatctggctcccaccggcaacaaatggaacgaatgttctaataatcggcatgaaacggccaattgcaatggttttaccaccatacttatcaaagaagacctgcgcctcttcaattttctcggtattgataaacttgccgaagaaccgattcttcgtggcggctaaaccgacccgttggccaatttgttcattcaatgaatcacccgcaattgaggcgattaagaacaaggcagcaaacagccagacattcaagtcattatcagtccgggctgccaaagcagcagcggcaaataaaagcgagtcccccggtagaaacggtaagataaccgccccggtttcaacaaagataatggcaaacaagatgacataggtccagttgccgaactgattaacaatgttgaccaggtgggcatcaatatgtaaaacaaaatcaattaactgcgtcatgcgatttctcctatactctttttcaatttaaaaatatatcccttattaggataccgaatccatgcatcaaagcaatcacttttgcattttcttaataaaaagccaaacgttacagcgcacgtttaccgcgccataacagccaagcaaaactaccctctaacaaaatgaagaagagtgcaaaacaaaggccaaaatagacttccggtaacactaagataatcggatcagtgattggatcaaactgccagttcagattgcgaaacaataattcgtggaacgtaatgaaaaaccgatcgaaattcatactagcaataaaccctaatatgggtggcaccacaagagcaacttgcattgggcggacgtattgccaaacccgattggtcttgcgccgactccgccaatgctgaatcgccgctccaatcgttactagccaaataactactgctaaaccaaacaagcgtttcacttcaacaaaatgttgccgaccatccaatgacattggaaagtcaggtagttgtaagcgtggttgccatggcacaagtaagtagcccattaaccggttaaagttcatcatcagccgcggttgcgttaattcccgttgactcgctagatcgaggtagtgactcactagcggataaagtgcccagcttaacaataacgttattaaaatcgcactgctgactaacgccaaatacaacgccgcccaactagtggtacttctaacccgctttaaacgtcccattcggttaagtcgttaatgatatgcgttggttgcaaggcttcttttgccacatcctctggcgttgaaacaccagtgtaaactaacaacgtatccatccctgcattcaagccagccttgatatctgtattgtagttatcgccaaccatcaccacttgttccttcgtcaagccgaattgctctaaggccatttccataatgattttttcaggcttaccgatatagagtgcactttgttgcgttgcccgttcaaccatcgcaatcactgaaccagcacctggcactagcccgcgttcgtttggtaaattcgtatccgcattggtgccgatgaataatgcaccgcgcttaatcgctaacgttgctaattcaaacttgtgataagtcacatcataatccaaaccaactaccacgtagtctggatcgaattcattggttctaaaaccggcatctgatagagcctgcttcaaaccgagttctccaatcacgtagaccgttttgccattcgctgtaccaccgtttaaattcaatagatagcgcgccgttgccaaagaaggggtatacacttggtcaactgccgcatgaatgtcatggttatccgccaaattctgaatcacagcagctggtgatttcgtagtgttgttcgtcaaaaacatgaacggaatttgttttgcttgtaggcgttcaatgaaatctttggcttctggcatccgatcacggccgcgatacacggtgccgtctaaatcaattaaataccctgcataatctgtgtttgtcatagttgtctaactccaattacgttttactttttattgtgttccaaaggacggatcttaaaatgacgcttattaactgatttttgattctcggttaccgccttttgagggcgttctttagtcactttttgcttgttatcggtgactttccgttctgtaaaacctggcttttgacgccgacgccgttgctgaccacgttggcgattactccgccgattctcattcttaatgattggcttgccttgacgttccaaaacaaagtaggcacaaccaaagttgcagtattcgtatagataatcttgtaacgtattgattaattgatctttattagcgcgtttgttggttgctttataaaagcccttcaaacgcagttgttcaaagccccagtcagccacaatataatcgtacttagccaacacttcattatagcgttcgttcaacttttcagcgtcgaagccttcacgatagttcacaacgacttcataagcacatttatcaatctcaagcgtggtttcagtcttcatgacaacgtgttgtggcacttctggttgtttggctgaagcgatcatttctttttcaatcgccttggtcactttcttggcaatcttgggactgtttttcgtatccgccacagcgaacctcctcttcccttataagggataatgtttacttaaatatttagcgaccgcgtctctgagaaaatcagggaacacgatctcggtctcgccaacaatctcaattgttggaaagaatggaatgaatagataatgatcgacggtcgtcaacgtatagctggcttctggatcaatttcttgcccatgccaaaagacgcgccgcaatttcatatcaaccgctatcccgtcataaacgatgtctccaaagattttaccacggaaactcatccctttaataggaaacttgcgtaaaaagagccggtttttctccatttcaagcaccatccgccacaaatcataccctttgagcgtcactttaatcagatgcattggatgcggtaattgagtttgcaaatcatctttagtaacaatcccagcctgcaaatcttgcaagaacaagccagtattcaatacggcagcttcagtgctggtcgcttcttcaattgcctttaaaccggtcgtcatcatttctgattcaccaattgcgttgattttaaaagcgtgtggcaacttggcaacatgctcggcggctaattgtgcgtgcccctttttcaggtagccttcaatttctgctgcgtcagtcttcacaactggtaagtccgcggttaaaaccgtccgagcacttttatgcatcacatggtgctgatcatccagttcaagcgtgatatcaccaaggtaatgaccgtacttctcggcagccgtcaataaggtttgattaaccagcagcccctcttctaaaagatgatgcgtgtgcgcaccacagacgacatcaatctcagggaattgttccgccagccacttatcagtcgtaatcccaagatgtgataggacgattaagatgtcatattgaccttcaatcgccgctaattgccgcggcaactcttcactgacagtcgtcggttcccaaccattcggccgataagttaagaaaaatggtgcggtcaaggcaataattgctacccgcgttccagcatcggtcgtcattagtcggtaagattgcgcaaatgctggcctttcgtttgttgcttgttcatacagattagccagtaataccgggaaattcgccttatcatacaaatgttccagatcagcatgactattaccgattccttcattgtttccaatcgttactccgtcatacccaatttgattgagtaactcggtattaatctgaccattcgttgcttcagtcaatggatgactacgatccattgcatccccgatgtcgaaggtcaagaccgtatccccttgctttcggtatgctgcttgatgttctaagaggaagcgccgcattctgggccaattttcaaaatgtgaatgtaagtcattcgtgtgtaaaatatgaattgtttccattttgcttactcccttcagctagtcgtggctggggtttgccagcgcggcttgtttgcgttcaaaaatgatttcaatctcatttgccgcaaggggtgttccaaacggcacccgttcaggtaataattcgcgctctggtgcatcaatcccgacattgatattctctgcaatcggcaacatataatgatgaatatgtccgtgcaagttgaacgtctgttggacctttcccaataataacggatagtgggttaaaaaatactgatggtgattgatcttaattagctcaccgacatcagcaaattgataatgcgccttgccagctgataatcccgcatcatgtttcgccaaatatttcaaaaaagcacggttatcatgattacctttaataataatcagctgcccattcaactgctctaacacagcagcgacttcagcaaaagcactcggcttattgggcaccattgcgacgtcacccaacaaataaacctggtcgtcagcttgcacccgttgattccagttagcaataatcgttgcattcatcgtagctacatctttaaacggacgcggcgcaaaatcattattacctaataattcggcgtgaaaaaaatgcgtatccgctgtgaaataaatcattcacaatcccacctaaccaatatgatttgcttttaaaatctcctgaaaggcttgcgcaactgcgccgtcttctttttcccattcttcccagtggtcaaaatcaaccgcaggcattgtgtaacgttcattaatgtaagcttcgtaagtttggaccgcattcgaatgcggaatgttgagttgtaaaatccggacttgcttaataaatccccggttagccgctagttcggcacgcccattcataaagatgttagccaattcataatacgttgtgccatctaagcgcgtaatttcttcaataatatcaaatgtttggtacttctccgccattgtgttacttcctattctagtccgatttcagttacgtttattctaccaatatgtacacaaaaaaaccactacccgcagatagtggttggcataagagagaaagagaattgataaaaaggtaattgcataagtaccttacaaacataatataccgcctaatgtaagcgttgtcaattgttatttttaatttatttatccgtttctttaaagttctgtaacaatcgtaggcatttgaaaggaataatggtatcttaaaaagagtagtttttatcaattgaggaggccattgatttgtcacagcaacattcacgatgggggcttttagtattaacaagcctttgtttctggtttttaaccggttttaccgttgtcgctcatcgtggcgaccccatcaacgcacccgaagaaacatttcaaagtatcgacatggccttttcgcaaggcgctaactatgtcgaactcgatttacacgaatctcaagatggcgtcttagtcatctcccacgaccgtaacttacaacgcgtcacggggaccgatgcgattgtttcgcaaaatacttttgccaagctcagtgaactcaaaatgagtaacggggaaccaccacacagcgtcgatcaattatttgagcactatcaaaacaacccaaatgcgaaattcctcatcgaaaccaagaaaaccaaaaagggaaatccgcaggacatggaagcaaaactcgtggcgctgattcaacaatatcacatgcaagaccgcgttatggtccattccttttccctcgctagtctgcaaaacatgcaacgtttaatgccagagattccccgcatttttatcgttggcagtttacagcggatctcattcgagagttttaaatacgccgacgggattaacatctcatcatccctcgtcaccccaaccatcattaaacagctccattatctccatcaaaaagtgtatgtctggaatgagatgtctgaaaaccaagcgacttggaactggttagtcaacctaaatgtcgacggcgtggtcacgaactatccggcactgggacgccactatcaggccgcacaggatcaagcagaaagtgaagccatcgacacaattgggcaagtcaatgacgttcaagacctccccaccgttgaaaatccatatgaaccaaccctcaataaaaagccggctaaagcgggccatatctacaacatcaccgaagccgttacaattgccgatcaaacttactaccgcattggcactaaccgctttgtcctcagcgacagcatcaacgtcggtgaaacagcgaaagccgctgctttattggtgggtaaaacggcgcagattaaaccaactgcgaacattgtcgctacttggaataatccgctacaccccacccagacaaccggttatcttagtgccaattcacaacagcaaattttaggagtgcgctatgttggtaatcaagtctggttgaaagtcgctagtggttggttcaagagtcgccaagcattaatcgacttcaacccaaaccaatcgctgatggtaacccacttttaccgtgaaattccccaacaattgcggccaaccaacttactgattaacccagcactgccactgcaattgccccaacaaccaccagtcgacacgcaactgtttaaccagtttgcccgttctctacaactaactaccattaaattctaacgaggtcaccttttatgacatccgattatgaacaattgattcgttccgtccaaaatactcttccaaaggaagaaacacttgatcacatctcaattctttttaaaatactaggcgataaaacacgcgctaaaatcttgtacgccctctttcaatccgaattgcgggtgagcgatattgtcagtgtgttagagatgtcgcaatcctcaatttcacatcaattacgtgcactcaagcaagcgaaactggtaaaaagtcgtaaagaaggcaaggaagttttctattcattagctgacaaccatgtcatcaatatcttttcgcaagttatcgcccacgtcaacgaacactaaggatcctattgacaccgatcaaattcactttggtcggtgctttttttaatgtcccaaacccatcatctcgattgcattctatcgtgtttggtggtatcttatagtcaacatatgaatatatgctcatatgtttgtttatttagtaaagattacgatttagcttttcactcaacaaggaggcctaaataacatggcacaacttcaattaaccggcatcgattgtgccgcatgtgctactaaaattgaaaagaacgttaacaagatggccaacgttaaaagttgctccgtcaatttcaccactcaaaaattaaactatgaactgaccggccaagaagctgttacggaattcgaacaacaactcgctactcttttgccaaccattgaaccagatgtggggattcaacaatcaccaaccccagaaccatcccccgcaaaacatgcgattaattatgatctcatccgaattctcgtcagctctttaggcttggcgatttcttatcttgtccctctaagcgcgccagctaaaaccacgttgctcctagctgcctttgtagtcatcggctacgatatcgtctggaccgcaatcaaaaatattctccacggcgaatggttcgatgagcatttcttaatgtcaattgcaaccattggggcctttggaatcggacaatatgccgaagccgttggtgtcatgttattctatcaagttggtgaatatttccaatcattagcggttaatcattcccggcgctcaattgctaacttagtggcaattaaaccaaccatcgccaatcggttagcggctgatggcaccaccgaagttgttgcacccgaagcaattcaggttggcgaacacatcgtggtgaaaccaggggaaaaagtcccgctcgacggtgtgattactaccggcgacagttacgtggacacctcagctattaccggtgaatctgttcctcgcgcctttcatcctggtgatgaactactcagtgggacgattaaccaatcaggtttattaacgcttgaagtcacgaaaccttatgctgattcaaccatcgctaagattttagaccttgtcgaaaatgcaagcagtcaaaaagcgcctactgaaaacttcatcacgcggtttgccaaagtctacacaccaattgttgtcggcattgcagccatcatggccattgtaccgccccttttattcggtgctccatttggcgattggctctatcgggcattgattttcttagtgatttcttgtccatgtgccctcgtcatttcaattccactcggctttttcgctgggattggaacggcttctaaaaacggcatcctggttaaagggagtaattatctcgaagctttaaacgatgtccaaaccgttgttttcgacaagactgggacattgacccaaggtagtttcagcgtcaccaccgttcattcggtcgatcaacaacctgatgaacttttagcactagctgcccttgtcgaacaacactcgacccatccaattggtcaatcgattttagcagctaaccaaacgccactcacaaagacgttatctgacgtccaagaaaccgctggtcacgggattagcgggcaactcaacggacaacttttacaagctggtaaggctagttggttacaagccagtggcatcgcaacactcacacctagtgaagtgggcaccagtgtccatgttgcttacaacaaccgctacttggggtatatcgtcattgcggacaccgtcaaaccagatgcacaaacggctgtcgcgcagctaaaacacgccgggattcatcaaacaattatgttgactggcgataaccaacccgttgcgcaacaagtcagcgccgtcttaggtatcgataagtatcaaagcgaacttctgccgcaagataaagtggccgccgtcgccaaactcacagaagaccgcgctaccaacggaaaaatcgtctttgttggtgacggaatcaacgacacacccgttttagcccgtgccgacgtgggcgttgctatgggcgggttaggttctgacgccgctattgaagctgccgatatcgtcttgatgtccgatgaaccgacaaaattagcaactgcgatttcgatcgccaagtacacccgccgcatcgtttggcaaaacatcattttcgcattagtggtcaaaggcatcttcttattattaggcgcctttggaattgccacaatgtgggaagccgttttcgccgatgtcggggtaacgttaatcgcgattttaaacgcacttcggattttaaagaagcactaaccttaaagggttcatggagactttgtgaaccttttattttttaatggcaagcgctttttaaatttgtaataatatgctaaaatgtgaatagattaataattaattaaccgttttttggttaaaatttaacaatgaaagctgggactgcaatgacattgaattggcaacaagaagcagcaaagtataaggatcaaatgcttgctgacttaacaagtttactcaagattaatagtgcgcgcgacgttgaccataaagaagacgacgcaccacttggccctggcccccgcgatgccttgctacaattcttagcaatcgctgaccgcgacggttttacaacaaagaatgttgaaaacgttgcaggtcgcattgaactcggtagtggcgacgaaatattcgggattttaggtcatatggacgttgtgcctgccggtgacggttgggaaacaaacccatttgaaccagtgatcaaagacggtaagatttatgcccgcggttcatcagatgataaggggccttcaatcgcagcatattatgctttgaaattattaaaagacaacggtatcgaattaaacaaaaaagtgcactttatcgttgggactgacgaagaaagtgaatgggttgggatcaaccgttacctcgaagttgaaccaaaacctgactttgcaatttcgccagatgcaaacttcccaatcatcaatggtgaaaaagggattgtgtcatacctcatgactttcaaaccagttgacggtgctgatggcgatatgacattggttagcttcaaatctggtttacgcgccaacatggtgccacaaacagctaaagccatcttaacgggtgcaatgccagctgatttccaagctaagtttgacgcctatgttgccgaccacaagttacaagggacaatcacaactgacggtgaccaaacaatcatcgacttaatcggtaaaggttcacatgctcaagaaccaaaagccggcgtaaatgctgcaacacacttggcaactttcttagctgactttgccttagatactaaaggtggcaactacatcggaacaattgcccgcttaatgcacgaagattcacgtgggcacctcttaaacatcaaccacacagatgatgtgatgggcgacttaacagcatgtcctgcagtcttcaactacacacaagatggtgtagcaacagtgctcttgaacgtccgttatcctaaaggtgtgactgctgaaagcacacgcgacggtttagcaaacacacttagtgatcttgctgacgtaacaattgacggtcatgcacaagaaccacattacgtgcctggtgacgatccattggttgcaacattattaagcgtcttcgaagaacaaactggtcttaaaggtcacgaacaagttatcggtggtggcacatatggtcgtatcttagaacgtggtgttgctttcggtgccttaccagaagaacgcgaaaatgtgatgcatcaagcaaatgaatatatgcacattgaagatatcatgaatgccattgcaatctatgcagatgcaatttacagattaacaaggtagagtgtgacgtaagtcgggtatccaccgaggattaatacaaagttgtgaatgattgcgtagcaatcgtttgcggctcagggttaaccggaaggatatggctgatagaacacatttagcaatcaaaaacggtccaaagcttaatcgctttggaccgtttttttgattgccttcatttatcagcaggcatcagcttaaacgttgaatgcccatctttgacaattgcgtataagatttgttgctttgtttcatcgaagtaaccgagattaacagccatttcgccatcaatctcttcaatcccctcaaaatgttcccgaattatcgaacgaacaaccttcatgttatccatgtgtttttgaattttctgtacagcaacccctagcgtgtagccttcatctaagaaatgcttgataaagatcgccttaatcattgtttgcgcgtcgtactcgcgggccttattgccatccaattcacgcgctttaatgtatcctttttgctcccagtagcggagttgacgcggtgtaacccccgccattttacaaacttcactaatcccaaaaatcaatcgatccgtatctattaactttaaaaaaaggtctttttgcaagtccccactccattcctattattatttttcattatagataatctattgggattgtcaagttaaataacacctttgtcaacttacttgacaaagataccaaatgcgtctaaactaataaatcgcatcaacaaaaacacacaaaggagatttttatcttgtcagacgctagaccattagatattcatgggaaaccatataatcggacagtcttagtcttggtcttattgattggtactttctgtaccgtcttgaaccagacgattttatcaactgctttccccacattaatgaaagcattcgatgtgtccacctcagccgttcaatggctcacaaccggtttcttactagtcaacgggattatgatccccattagtgcttggttaattaaccgattcaattcaaaagtcctctacatgtcagcaatgactgtcttcttaatcgggactattatctgttacatcgcaccaacgagctcatttgcaactctattaatcggccggcttgttcaagctgctggtgttgggatttcaatgcccattttgcaaaccattatgctcaccatcttcccacctgaaaaacggggaacagccatggggatggccgggattgttatcggcctggcacctgctttagggcctaccctttcaggctggattatcgattcatacaactggcgtgttttattcggcatgattattccaatcgtgattctcgtcttagtcctcgctagtttccaaatgaagagtgttattcaactttcaaaacctaaaattgatgtcccttcaattattttatcaactgtcggcttcgggagcttgctttatggcttctcagaagttggcgataaaggctggggcgatgcgctcgttctcacaaccttagcaattggcgttgtggtaattgctttattcatctggcgccaactcacgatggaaaacccattcttggaactccgcgttttcaaatcacctgtcttcacaattgccgctattttaagtggtgtgacgaacatggcgatggtcggtgccgaaatggtcttgccactatacattcaaaacattcgtggcgaatctgccttccattcaggcttaacgttattagctggttccctcatgatggggattatgatgccaattacgggccgtatttttgataaatatggtgccaaacgcttagcaatgaccgggatgttcttattgatggctgcaactgcgccattcatcttcctaacagctactaccccaatcatctacatcgttgtgttatacgctgtccggatgtttgggatttcaatggtgatgatgcctgtcacaacttccggaatgaacgctttaccaatgaacttaattagtcatgggacagctgttaataatactttccgccaagttgccagctcaatcggaacagccattttaatcagtgtgctttctagtgttacaaaaggcaatatgccaagcacacacatggtcaagacattaccattggccttccgcgataagatgattgatgccaccctttctggttatcacgcagccttcatcgttgctgtgattttctgtgtgattggcttcatcatcacattcttcctctcttcaaagaaatctacgattaatgggggtgccaaggcatgatcgtcattacactcgttatcagcacactcgcattattcttttcatcgattttcggtcaaaagatgtggcgaccaatcttaatgaccatctttggactcacatttatcgcttcactcgttttcatcgtccaaaatgatcacaatcattacggaatgaaaactgtgaccgaaactaagacgcacacgctcgtttcaagcgcagatgcgaagggcatgtcaatgcttctctatcacccacttggtaacggcactgaaaaagtctatctttatcggaccgatgccaaccaaagtaaacccaaagcaacccaaactgaaaagacaaccaacagtgttcaaaaaaatgctgataaagcagtcttagtgacaaccaccaaataccgcgtttatcaaaataatacggctaaattctggttcggaatttctggtaacgaccacgaattcgtaagtcgtcacaacacatttaaggttgctaaaggctggttcgttctaagtgatgttcaagctaaacaactcgctaaagcattaaaaggtcaacaagcacaacttaaaactggcgcagaaaatgccggtaaacaagctgtgatggctgctatgcaagccaatccagcaatgactgctgatcaacaacaagcggttgctaaaaaagcagcaatcgcctatcaacaagccgcaatggctaaagtgatggcaacattgaaataatgcaatcaaaaaatcccccacatcgtgatttgatgtgggggatttttttgtggtggaaatgtgctccgtcatccatatccttgcggttaaccctgaatgtcaaacgattgctgacgcaatcattcacgatatgccactaatcctcagagcataaccgcctgctgtcgcactctatttgcttaacaagcttgctgctgcttcgtctacgatgattgtcacgtcgtcgtgtagttgtaatgcacttgctgggacgtctgttgtttgtgggccttctactgtgcctttgatggcttcagcttttgatttgccatatgcgaacaagacgattttcttagcttttaagattgagccaatccccattgagattgcttttgttggtacatctacttcattttcgaagaaacgtgcgttagctttgattgttgattctgttaattgcacttcttgtgtattgctgtcaaacgcagcaccgggttcattgaagccgatgtgaccgttttggccgatccctaagatttggatatcaactgggttatcagcaatcacttggtcatagcgttttaattcagcagaaatgtcgcttgctaagccgtttggtaagtatgatttagtaaatggtttcttgtcgaataagttcttcttcatgaaatagtggtaactttggtcgtcatcagctgataagccaacatattcgtccaagttcacggatgtgcaacctgtgaaatctaagtcgctagccactaatgtttcgtagaatttaattggtgaactaccagttgccaaaccgaatactttagcgttgtttgctaaaccttctttgaagatttcaaagcttttttggccgccttctacttgatctttcactttaataattttcatcatgattatctcctcatcatttaaaaattcaagtcgtttattggtatagtccaattataaacggctaaaatttcaattgcaagccttttgacgctaaaaaacgcgctaaataattggtatacctaacgtttagcgttttcacggcatttcgttaaaagcttacttttaatcgctagcaaacgcccccctttttgtgtctgctgattcaaattggttaaccaattgcactatattcattgattgccgtgcatttctggatatttttcatttgtcttacaaatccgaaatcgggtatgataatgcgctgaactattatataatatgggacagtatgagaaaaaaggtggcgttattatttgaatgatccaaagcaccgttccagtcgatggcgagcactgctccagtcgagcagacaaaaggtctcaacgctattgacatctactaaagacagactcgcacatttgctccatttacccgataaacgttctgcacaaccaactaaggaacaaaaaagagcctacatccaagagttgagccaatcaccactctcttttaagattaacgtcttctttgaagccattaagagtatttttctctatgggatctcaattggcttaatctgtatggcgctcgctgctggaattggcgcgggctattttgctgcgttaatgaaatccgaaccaattcctagttatcaagtgctaaagcaacaacttgataataccgatcaagcagccggtttatactttgccaagaacaataagttcggcgcaatcaaaaccgacttaattcggactcccatcaacatccatgagatgtccccttatctaaaggatgcgattgttgcaaccgaagatgaggatttctataaacacgatggggttgtccccaaagcactcttgcgggccgttatttccgatgtcactgggtttggttcacaaaccggtggctcgactttaacgcaacaattgattaagatgcaggttttaacctcccaagtaacccttaaacggaaagcaaccgaagtcttgctcgccttgcgggtcgataagtatttcactaaaaaagaaatcttacaagactacttaaacgttgccactcttggccgtaacaataaaggacaaaatatcgctggtgttcaagaagcagcattgggcctattcggcaaaaatgctaaggatctttctctagccgaggctgcctacattgctggtctgccacagagtccttccgtctatacaccatatgatcaagacggcacccttaaagatcctgaatacttaaaatatggtctagatcgtaaaaataccgtgttattccggatgtatcgtgacgatcgcattacaaaggctgaatacaaagccgctaagaaagtcgacttaaccaaagaattccaaccaaaagccgatccagccgaaacaacgaagagttatggctatgtttataacttacttgaaacacaagcaactgatattatggccaaacagttagccaaagaagccaatgtttcaactgccaaacttaacaaagatccaaatctctacaaacaatatgaaacacaagcaactgaattactcagcactaaaggctatcaaattcacagtactatcgatcaagaaatttacgatgccatgcaaggggttgttcaccaacagggcgcaacattcggacggacttataccgataccgttactgacgaagaaacggggttacaaaagaccgtttcgtcccctgttcaaaacgggagcgtcttgttagataaccgcactaggaaagtgatttcttttgtcggcggacgtgatttctcactcaaacaaacaaactacatgttgaccaaacgttctcctggttcaactatcaagccattgttagtctatggtccagcaatcgatcagaaactgattggttctaaaacgatgttggccgatttcaagaccaacttcaaggattacgcaccaaccgattacggtggcacgatccagaacaaattcattccagctgacgaagcgttagcccagtcattgaatattccaaccgttaacctttataacgctttgaagaacacaacagatccttctaagtacatgagtaagatgggcatcaacctcaccgctgatgaatacagtcaactggggatttcacttggtgggaccagtgatggggtcagcgtcttagaacaggccagtgcattttcaaccttcgcggatcaaggtgaacataccgacgcctacgtgattgaaaagattacggatcccgccggtaatgtcgtttaccaacatcacgctaagaagaaacgcgtcttttcaaaagcaacgtcgtacatcatgaaccaaatgttagccggcgttttaacagatgggactgctacttcaatttacgatcaactctactttaataccaacaacttagttgggaaaaccgggacttcaaatgataaccgcgatatctggtttatcgggagtacccctgggatcaccctcgcttcatggatgggttatgacagtactggtcgtaacttaactgacaactcaagccagattaatgaaagatactggtcaaaattggccaacagcgtttatcagatcaacccaagcctcatgcgtttggaagatgatcatgaaaagccaagtacggtcacaagcagcaaagtcttgaaattaactggtcaattacctggcacggtttcaatcaacggcagctcacagaacttgaacggttcaaccgtcacctcgctttataacaactggacgccaaaagcaactagctatgaattcgggattggcggttctgcccggaactacgaaactttctggaaccactatttaggttataacaacggctatggttcaattacctatagcaccgctgatgaattaaatccaactagtggctacagtagtcgtcgcagtggcaccgcagcaacaacgacaaataattacacagcaaacacaactggtactgctgctacgactggcactacaaccggtacgaattatacagcgaataccaatccaacagatacagagacaacgaactaaactaaaaaaggcctcagttctaacgatttaaaatcgtttggaactgaggccttttttgattggtggaaacgtgctcttgtttgcaacaacttccgcttaatctaaaaatcccgttaatcctaaaacctggattaacgggatttttttattaatgctcaattgctgaccgcaaccaatagcactctattttgttgattctcttgctacgatactgtatggcaataggattgtcttgtcgtttacgtcttctttgttcatcatctttgttaaaagccgcattgctacggcacccatatcatacaatggttgtgagattgacgtcatcttaggacgtaccatttcagttaacttcgtgttgttacttgtcacaacttcgaattcagctgggatttgaacgccggcatcaactgccccgttcaagacaccaactgccaattcgtcatcactgacaacagcagctgttgccccagttgctttgattttgctgaacaatgcttcaccagcactgtagctgtattctgtttcaaaaattaaactttcgtcataagcaatgcctgcttcattcaaggcatccttgtaaccgcataaacgatacttgctgttaattgggaatttcaagctaccacaaacgaacgccactttgtcatgaccatttttgattaacttcaaagttgcatctttaacagcggcaacgtaatcgatgttaacactacccacttgttcgtctggatcaattgaaccagctaacacgattggtgtctttgaacgtgagaattcagcgcggatttcgtctgaaatactgtggcccatgtagattaaaccgtcaacttgttttgccaataaggtattcaacacttgaacttccttttggttgttttcatctgagttagccaaaataatgttgtacttgtacattgtcgcaacatcgtcaatcccacgagcaagtgatgcaaaatagatgtcactaacgtcgggaatgatgaccccaaccgttgttgtcttcttgcttgctaatccacgggccaccgcatttggacggtagtcaagacggttaataacttcaagaaccttcttacgtgttgcgggtttcacattcgggttaccattgacaactcgtgagacagttgccattgaaacgtcggcttcgcgcgcaacgtcataaattgtaattgtttgtttttccatgattaaatgattcctttcatttgtaaaataaaatagattatattttcagcagttttcattttacttcttgattaatttaacagagatttaaagcaaatgcaagcggtttacactaattttcatgaaatttacatttttgttttcatttgtggtttacattaccgtttacattggttgtgatatactagtgatatcaattgtaaaggaagtgctttagatgaataatcaattagcccaattacaaaattggcttggtgagaataatatggatgtggcttacatcagtaatccaaccaacatcctctatttcactggtttcgaaagtgatcctgcagaacgggtcttagccctctttgtttttgcagatcaggacccattcctatttacaccacaattagaagttgaatctgctaaaaaagctggctggaaactcgacgtttacggctatctcgatcacgaagatccatacgcaatcatcgcagatcaaatcaagaaacggaatgcgaaccctacacgttgggcacttgaaaaagacgaccttcctgttcaacgttacgaagccattctaaagcaattcccagacgcaacattcccaggcgacgcttcacgtttcatggaaaacttaaaattaattaaaacacctgaagaaatcgctttaatggaagcagccggccgtgaagccgattatgctttcgaagttggtttcaatgccttaaaagcaggtaaaacagaacaagatatcgttgcagaaatcgaatacgcattaatgcgcaaaggcgttatgcatatgagttttgataccatcgtacaatcaggtatcaacgcagctaacccccatggtggccccgaagccaacattttaaccccagatgccctcgtgctctttgaccttgggacattgcataagggttacatgagtgatgcgacgcggaccgttgcttttggcaaacctgatgcgaaatcactcgaaatccacaaagtctgtcttgaagcaaacttaactgcccaagcagcaatcaaacccggtatcacagcggctgaattagataagattgcacgtgacgtcatcactaaagcgggctacggcgaatacttcatccaccgtctaggtcacggcattggaacttcagaacacgaattcccatcaatcatggaaggcaacgacatgattatcaagccaggcatgtgtttctcaatcgaaccaggaatctacatcccaggcgttgccggtgttcgaattgaagactgtgtccacgtaacagaaacaggatcagaagccttcacacacatgacaaaagaactacaaacattctaagagtgctgattcaaacgggttggctttgaggattaacttaaaaacgcggattatgacgcttttcgtcatgattcgcgttttttggttaaccggaaaaggcagtttgaaacagcacgtttcaataagagtgcccttaattgcggtcagcaactgagcactaattaaaaaaggcagacgaaatcacaaaatgatttcgcctgccttttgttttaaagaactttataatccctagtcgttaaccattcaaactatgttacagtaatcctaacagtaagtttatgacggtggctaacgctcagaaatgaggtgatgcctatgttgattaagcgttaccttgagaaaggataacatgtcggttttcaacgcactgatgttggcaatttcggttgccatgttagtcattgagattctgaaatttaatcaaaaaaaataaccgtctaaactttgacgagtcacggttattttttaccaaaaacttgccaccgtcttaagcggactgtggagaagagtcgtgttgtcgcacggctctttttctatgctttcattataacaccgacttttaaaatttgcactagtcgtcaattcaaacaagcaaaaaagcccccgctaaatcaggcttggcgggggctttttcattgattatttatcttcagtgacttcttcttgaacagtttcaacagcggcggctgcttcgtctttggcttggccaaatgcactcttgccgtcgatcacgatatcgtcgaaatcttcttggctagcttcaaggctgccgccaaattgtgatttcaagtctgctgttttttcatcaaattgtgcttttgcttgttctttgatatcagacgcattgtcttgccaatcacttgcataatcatggacgcgattcatgtgtagctttgcgtcgtcttttaagtctgctgctgtttcacttgctaaatagtagtagtcttgtgcgcgatccattaaatcatcacctaagtccactaattttgattgtaattccttacccgtcttaggagttaacattaatgttgcaccaatggctgctgcgccaccgactaatacacctaatagaaaatgtcctttttttgccatgagaattactccttatcctttgtttgacgtcgattttggtaaaatcttaatgcacttgcgccaaccttcgaagcgaccgttgccttagcggttgtccgcccaacgttggtaacatgttccgttaaattgcgacttgccgtattcaaacttgaaacgctctcgccaagttcgccagccgctctgaaaacaggatccaagtcagcgactttcccgttcacatcgtctagcaatacgttggctttgctgagtaaaccttctacttctttagataaaatatcaacattctcagtaacaaccgtgacactcttgttggcttccgttactgtcttagaaacatccgttaatacttttgtgacttttaatagcatcactattagaaaaacaactaggaccgcaaaagcccctgcggcgattagcgccgcaatttgaccacccgtcattgatttgttcctcctacttcgttatctattacattgtctcttaaagactagaatagcattatttcccttaaccttcaattatcttcactatattaggtgccattttttctgacatttgctaaactaaagacatgctacaaaaaaggagtttcacgcatgttcacacgtttattagcggccgcaccaactccggtcgaatctgttcagaaacagaccaatatttttatgcgctacatcacttcaattgactgggataaattactcagcaccctcgttgctggattgtttcaaattatcctactctccgctttattctacctcatcaatcgcttaggtaaatacatcattaagcgcagcttcagaaaataccgcaaaactgatggtttctcaagtaaccgcatgaacaccatttatactttgatggtcaacgctttttcatacctcgtgattttcttctatctctatgcgctactcagcgttctcggcgttcctgttggtaccttgattgccggcgctgggatcttcagtttagccattgggttaggcgcacaaggtttcgtcaacgacatcgttaccggttttttcatcctcgcagaacaacaattcgatgtgggtgatatggttaaaattggtacggtagaaggcaccgtcaacgcgattggcttacgaaccacacaagttcaaagttacgatggcaccttaaatttcattcctaaccgcaatatctcgatcgtcagcaacctatcccgcaatgatatgcgtgttctgattaacattcgcatcttacccgacaccgacttacaactgttagcggcaaccgtcaatgaagtcaatgtgcaactggtgcccaaacatcctgaaatacaagatggccctacgattctcggggtaaccaccctcgcagatggtgtccttgcttaccagattgttatgcacaccactaacggcgaacaagctgccactaaccgtactttcttacaggcttacttgcaagccttgaatgaagctggtgtcccattaccttcaacacccgttacaattcccaccaaataaaagtcccctcatataaaaaggagaaccgcttatgccacttattaacgcactcaaaggcgccctaatcggcgtcgcactcgtaatacctggtctatccggcagcattttcgccgttatcgttggtctatacgaaccgcttctggcggctatcgcgcaattcaaaaaagattggcgccaagcaattggctttttatggccaatcgggattggcgctgggatcggcgtcttactctccaccaaaatcattctttggttatgcaccgcttatccactagcggcatacagtttcttcatcggtcttgtcgtcggcagtctcccattcatctggcgtagactcgccggactcaactggcaaaaagtgttaatcgccatcgtctgtggcgcaattatgctactactcacccagattggtggtcaccaatctgaatccgacatcgctatcaaacaactcactaccctccaagactttggcacgttactatttgccggcttcttctcagtatcactcatgctcatcccaggcgtctctgggtcaatcatgctcatgattgtgaagcaatatggcactgtttatcacgctgtcagtcaactactcgacttaatggtctacctcgtcacaggacgcttgacacaagccacagaagcgttcaaaagcgtcgcgctcctcttaccgttcatcattggggccgtcatcggaactgtgattgttgctaaattaatgcactacctattagcacacttcgtcgaatacgtttacgccggtgtgctcggcgttgtcattgccgccatctggattcttgcccaaaccggcgtcgcaccagcctggccagccctaacaaccgccacagcactactaggacccatcgcactcatcatcgctatgatcatcctaggcacaatcgcaacaatctacttcgacaaagcatagagtgctgttaaagcgatttgcctctgagcattaattaaaaatgagcctcaatctcgtcttttgagattaaggctcattttagattaagcggaaggtgttgcaattaaaaagcacgtttccacaaaaaaactatccacacccttcccaatcaagttgtggatagtttttatttattatagtgctttaatcgctctaagatgttcaatggattgaagtcaatatttgagacagattttaagagacattcagaaccgcgtttaccttccacagctcaaataaatcattaatcacgataataacttatttgaaccctggaaagcattaaatcaggcggccatttggctcgtaagtgtatttcaacttgtaagggggtctggtagcccagtgaactatgaattctcttcctattgtagaaataataagcattggggggttgctaaaaatgacattaactatgtgtcaccgaagcaacttattgatcaaatttgtaattccagaaaagtcggtgctaatttattaattaataccgggcttgaatttgacggtgccattccagcattttcacagtcgttattgaagattgtcggacaatggatgtcagtttatggagaagcaatttatgcgacaaatcattatgaaaatcagacctacttggcaagtggcgagacaaccgattttatcaaaggaaactatctgtttgtctatggtttaggtaatataggtaatagtaatgttgtgctgggtggcgaaaaggcgcggaagatagtgtttaatcaatatccgcaacgcgtaactagcatcacttggttagataatcaagcgttgtttgagtttgagcaggctttagacgggacgctaacaatttatgccaatgcttttcaatatgggacacatttaattgatcgcgtagccactataactgtcgaagactagtgacgaggtagaagatgaaaacaaaagatgtaacgattaggtatcaaaaaacagcgacggttcatagtaatcgcaatcaactggcttggcttggaaagatagcagttgggacatgtttcttgatgtacgtgtcatatatccaacaaattatggctaatttagctgggcaccctgtgtcggcgattcaaccaagcgttgcgatggttaatgcgactttgtggtttagttacggttggtttaaaccacataaagattggccaatcatcatttcaaatgtcccaggaatcatatttgggctggtaacattaattacaatttattaccattaatagcaaaataacccgggtcaattgacccggggtatttttttgatcaacttacgctaaattaattgacaccctttatgaatggtatggtaccataggcgtaattagaaaagcgaagggattcgggcgcatgcgacgttctaaatggataataatcatcattggtttaggagttttaattggcagtggatggtggcttttagggaatgcaacgacgcaaaaagcgcagcaagtcaagcaaacagaaaatgaacagcccactttttatttgcatggttatggcggttcggctcgttcgactgatagcatgatcaaagctgctcgcgaacaaaagaatgcgacacaggtcctcactgcaaccgttcgtaaggatggttcagttgatttacaggggcgttggttagctaaaacgacacgaccaatcgtgcaagttgttttcgaagataatcgcaatcctaactatcaacaagatggtgagtggtttaaaaacgtcttagtcgcggttaatcggcagcacagcttcaaacgattcaacgtggtggctcattcgatgggcaacttgacggccgtttattatttattgaaccatgcgattgataaacagttaccccgtatggcgaagatggtgaatattgcgggtcattttgatgggattatcgggatggatgatcagcctaatcaaaaccaggttaaaaaggatggccaaccacaaaaaatgaacgcgacttatcggcaactgatgggactgcgtaaccagctccctgctaaatcgattacggtgttgaatatctatggggatttaggcgatgggacgcattctgacggacgtgttagtaatgcatcgtcacagtcgttgcggtatttggtgacgcctggtgcgaagacctatcaagaaaagaagtttactggtaaaaaagcgcagcatagtcaattacacgaaaatcatgcagtcaatcaaactgtcttagcgtttttatggtaaaacatacttaaaaagtggtggcgacaaaaattaattttgtcgccaccacttttttaatgttcaagacggtagtctcgcgctgcttgttcgagattcgaaatgagagcttgttgttttggtgagaagaactgggtcttacgataggctaacgagatataaaagattggttgtggttcatccaataaatcaagtaccactaagtcatcagcaggcgtaatactggtttcagttagaaaaccgatgccgacattttcgtgaatcatactttttaagacactaacgtcattggtgcggtaaataatttcgggtttgatttgattgacgtccgataagttcttgaagaccacgggatgcacgaatccttccgcgagcataataaatttctcgtgggctaaatcacgaaaggcgaccgctggtttctgggctaagggactatcaggtgcaactacaatcttaaaatggtgacgttcgatgactttagctgtgatggtatcggtttgaagtggcgtcgcagagccaagaagcgcgacatctagttcaccggcttctaatgaagccaacaattctttggaacccccatcagctgtcttaaaatgttgaatcgtgccgttagcggctagcttttgtgctaattttgagaagtagtaagtgccgataattggtggcaagccaaaacgcaaatcagtagcgttgagattgagcatgtcggcctttgttagttcaatctccgctaatattcgcgcggcatgttgataaagttgctcaccactaggggtaataatcaatgattggtgtgattgatcgcgctgaatgagtttggtcgcgaattcatcttcaaggcgtttgaccgcgtaagtgatcgtcggttgactgaccttgaattgatcagcgactgccgtaaaattttttaatttaattagcgcagcaaaataggccaaatctttaatcttcataaaaactcctgtttaatgcagtttagacgtttcatataaatctattttatcataaatgtaagttttgactatcaaatgttgaggcgtgtatagtgaccaacatgatataaaagaaaaggagatttttaatatgaaagcacaacaaattttaaatgatccatttttaaataagggtacagcattcactgctgaagaacgtgcacaatttggtttaacggggatgttaccacctcacgtgcaaaccattgatgaacaagttaaacaagcttatgcccaatatcaatcaaaagccaacatgcttgaacaacggattttcttaatgtcaatttttaatgaaaaccgtgtgttgttctttaaattattcagccaacatgttgctgaattcatgccagtggtttacgatccaacgatcgctgacacaatcgaaaactacagtgctttatatgtgaacccccaaaacgctgctttcttatcaatcgacgatcctgattcaatgaagacaaccttggcaaacgctgctgatggtcgcgaaattaaattaatcgttgtgactgatggcgaaggaatcttagggattggcgactggggcacacaaggtgtggatatctcagttggtaaattaatggtttatacggctgctgccgggattgatcctagtcaagtcttaccagttgttttagatgctgggacgaaccgtgaaagcttactcaatgatgagttatacttaggcaaccgtcatgaacgggttcgcggcgatcgttactacgatttcgtcgatcaattcgtgcaaacagctgaagacctattccctaatatgtatcttcactttgaagattttggccggagcaatgctgctaatattttgaacaagtacaaagatcaaatcgtgacgttcaatgatgatatccaaggcacagggattatcacattagctgggattatgggcgctttaaatatctctggtggcaagatgaccgaccaagtttacatgagctttggtgctgggactgcgggtgctgggattacccatcgcatcttcgaagaaatgttacaagaaggtttaactgaagaacaagcacgtagccgtttctacatggttgacaagcaagggctattgtttgatgatgatccagaattaacaccagaacaaaaaccatttgcgcgcaaaaggagtgaattcgcgaatgctgatgaattaacaactttagaagctgctgtcaaagcaatccacccaaccattttagtggggacttcaacccaacctgggacctttacagaatcaatcgtgaaggaaatggctgctcacacagaacgcccaattattttcccattgtcaaacccaacgaaattagctgaagcagctgctgcagacttaatcaagtggactgacggcaaagctttagtagcgactgggattcctgctgcacctgttgaatacaacggtgtcacatatgaaatcggtcaagcaaacaacgctttagtctatccagggcttggtttaggcacaatcgcttccactgcgaaagtcttaaatgacgaaatgattagcaaagcagctcactcattgggtggcattgttgatccaacagaacctggcgcagctgtcttgcctcctgtgacaaaactagatatcttctcacaaacggttgcgaacgctgttgctcaaagcgctgttgatcaaggtttgaataaagaaccaattgctgacgtgcaaaaagccgtcgcagacatgaaatgggaaccagaatacaaagcactataatttaaatataaatcggtaggagcgtgaaagagttggcagcatttctaacatcattatcaagcgttgtcgaaatcgtcttagtcattgcattggggttttggctacggagttcaaaaaaattcgatgataattttaaaggcacaatttcatttttaatcatgaatgtcgctttaccattatcaattttcgtctcagtattagataacttaacccgtgaaaagttggtcggtttatctggcggcttgatctacgtcttaattagtttcgccctcggttatctcgtggcatggttactaaccaaggctttccggattcggccaggtcgtcgagggacatttatcaatatgttcgtcaatgctaataccatcttcattgggttaccattgaacttggcactattcggtgacaagagtttaccttacttcttgatctactatgtggccaatacggtttcaacatgggcaatcggggtcttcttcatctcaaatgatgatccaaccaaagaaaaaggcgctgctaaaggcaaatttaactggcgtaaattattaccttcaccattaatcggtttcttagccgcattaatttatcttttaactggtttaccattaccagaacttgttgataagacattctcaatggtcggtggcatcgtaacaccaatgtcattgatctacattgggattatcttagctgatgctggtttgaaatcaatccatttcgaccgcgatacagtccttgcgttattaggccgtttcgttgtggcaccagccatcatgattgccatcatgctattcttcaagaacacaacttcaattccatcaatcgaacaaagcacattgattattcaagctgcaacacctggtttggctgtcttaccaatcttagttggtcaatcacatggtgacgttaaatatgcaacgaacgttgtcacaacaagtaccgtcttattcgtggtcgttgtcccaatcttgatgcaaattgttcaatatatctaaagcttaaatgtgtcgttcagctgacactcccctaaatcttacccccagcgcgccgtctcaattaattgagacggcgctttttttgtgcaaagaaacacaaagaatgttgtcaaaggcggcaaagtgcattacaatgaaaacggatttaataatgtgaaggggacgatagcatgacagagaaaatctacactaacttagcacctgaaccattgggaccatacagccaagcgattgcaacggatcaactggtctttatgtcagggcaactcggattaaaagatggccaattggcaccggacttagcgagtcaaacaaaacaagcaatcacgaatatgcaacacgtgttagcggcagcaggattatccctagaaaacgttgtgaaaaccaattgttttttaactgatttggatgactttaacgaattcaatgaagtatatgcgcgattcttcggtgatatcgcaccggctagaagtgccgttcaagttggtaaactaccagctggcgcaattgttgagatagaagcagttgcaattcgttaatgccgtaattgactgaataaacaaccatttgaaaaaagcctccagaggaaattaaatgcatttcatttaatcatctctgggggcttttttgcatgcctgaaatttaatgtttaaagggatgttcatgggtacaaatactgatatataggcattgttgtgaaaatattctaccaatgttaattataaaaagattaaaattagatgatgaaaattgcggataaaatgaagctccagcgcgaccattttgatgacatggaaccgaatacaaatatcggcattaaagaagtttacacatgttgcataatcatagatagggattatctctttaaaagatttaacagattcgttttaaaacaacttgtacacaatttaatagcttatcagaatgaaaaaacattaagtccaattggtgattaattgattgaatctttgatatcccaattgataactagaccgtaccaaaggtgtagtgatgaatggaaaaatagaaaaatcatatggaggtagacgatggatagaagaaaattagcgctgggtgcaacaatgctgaccatgttattgacgtttatctgtatcaatagtggtcgtactcaagcagcgatacccgcccatattccaatcgatggcatctttaaaccctccattggggtagatagttccgttcaagcaggtggaattgtgcaagtgacaccagatagccagaacaagaagggggcaatttggtcggaagagcagtataagattgatttgacacataattttacaagtttaatgtatgtcaatttaggggacaaaaaagcgcaatcggttgacgggatggcctttgcaatgatgaatgacccagacaaggttaagaattggcagcaagtgaccggtggcgcccttggtgtttggcggaatccattttcttgggtaaaagataactcagcaatcgccaagtcatttgccgttgaattcgatacgtaccataatggcaatgattttgacggtttgctacccaatgatggcccagatagaggccatgttgcttataattttccaggacaagatagtgcatatcagcgtttaccaagtcgcttgtacgcgctaaaccatctacaacttcaaaaaccgcaaaatggtgattatttatcattagtaacattaggccatatcgtgatggcaccaagtgtacaggctgcgacaacatcgaatgaaacaactacgaggaaaattgcactagaagcagggggacacaacaacgactaacccaccaattgtgccagggacagatggaaacggaaacggaccaactggcgcaacaggggatatcacgattgataatttaacaccacttgattttggtaaggtgaaactgactggtggcgcgcaaaacgttaagaatatcgttaaagatcctaacgtacaagtcaccgataaacggggaactggcgctggctagaatattaccgttaaaagttcagaatttaaagacacaacggattcaacgcatatcttaaaaggcgcacagattaattttccagtcggtaaagtagtcgctagtgattcaacgaatactgctgcaccaacagccaaagcgattactgttcctgctgatgggttggataatgcgcaaatcttgatgagtgctgataaagataaagggatgggaacatgggcagatgtgatgacaactgacggcattacactggatatcgctggtggcgcttatgctggcagctataatgctgatttgacctggacacttggggatacaccgcttcaattagctggcagcagccgctaaatttgaaagaggcaagtgttaagtcgttactgcaacggactaaattttaatcgatgtgcaaagtgattaaagagagggacttcaaaaatgaaatggatgcatattttacaaagaatcagcgtcgtcatcttaatgggcggcatcgcgttgtggttgaatacaacgaccgtccaagcggctgatcagagtatgaattaccaagttaaagcgaatttacccagcagtcaaaacaatcaaagtgtaacgtattttgatttaaggctggcacctaatcaggaagagacgattagtatcacggtgcaaaataaggataaccaagcgcatatctttaacatcagtccgaatacggcggtgactaatcaaaacggggtcgttgattatagccagtcaaagaaaaaagcggatgaaacggcgcctgctaatattgcctcactgattacgggggataaaaaagtaacggtgccggctcacagtagcaaggacgccatttttaaaattaaaatgcctgctaagaagttccattgtactttattaggtggttttaatattgttcgtgaagggcagcctaccgttaaaaagcaaaagaatcgcgtgacattgcgtaaccaattcgcttatgtaatcggtctgaaagtgaccgaaagtgatgccattattgcgccaaatctgaaactgaatcacatcaaagcggggatcgttaactatcggacagcaattacggctaatttacagaatacaaaggctgttatgatcagaggcttgaaagttgatgcggtggttaccaagttaggctctgatcaagtgcttcaccggacagtcaaatcagacattgcgatggcaccgaattcgaactttgagtacgccatcaactgggataatgaagcgctgaagccgggcaaataaatgcttaagctaaccgccactgataagtcgggcggttagtggtattttacgagtcggtttaatattacagagcaaaaagcccatcaagctaatgaccaagccgttgatttacaaaaaacaaccattaactggtggtatatcatgcggtggcatattcctggtgctcttagttgggtatattatttttctaaaacgacaagcgaaaaaagcctgattcaatgaagtcccaatcctgagcgcgtcatcgattagaatggattcgaaaataatcccttgataatgaatagatggaagtattatctctattcactaccaagggatttttatatgtgctgcgttattggttgttcggttaattaggtttaaaaaagagggaatggattttatatcacgttatttacgaatgatattcataaacagtggttttttgatgccatttaacgtataataaattaaaaacaaattagagatgaggcaagaatattgatttcgactgaaacgacactagctgggtaccactttgataactgtttcatgaacgcggcgggggtttattgttatgatgctgctgagttaaatcaagtgcaggcttcaatggcagggactttcgtgaccaagagtgccaccgttatgccccgctctggaaatccagaaccacgttatcaaccaacgcgtttaggcagtatcaattcaatgggcttgccgaatgaaggcctaccttattatttagactatgtgagtcaacagcaaaaggcagtgccagacaagacatactttcaatcgattacgggatttaatattgaagaagacgagcaactgttggcacagattagtgcttctgattttaaaggtgtggtggaattgaacttatcttgtccgaacgtaccggggaagccgcaaacgggctatgattttgaaatggtggaacgaattctaacgcgagtttttacggtttatcacggtccattaggcgttaaattaccgccgtactttgatatcgtgcattttgatcagatggcggcgattttgaatcaatttccattagcgtttgtcaattcggtgaatagcattggaaatggcttgaaaattgatgtggcaactgaacgggttgtgattaaacctaagcatggtttcggtggcatcggtggcgattatatcaaaccaaccgccttagcgaatgtccatgccttctatcagcgtttgaatccagccattcaaattattgggactggtgggattaaatctggtcaagatgcatttgaacatattttatgtggggctagcatggtccaagttgggacagcgcttcaaaaagaaggccccattatttttgaacgtttaacgcgcgaattacagacaagcatggctcaaaaaggttatactaaactgtctgactttagaggcaaattacaatatttagattagttgaaatgaggatttacaatgcagtatcgttatttattttttgacatggacaatactttattcgattttgatgcggatgaagatcaagctttggcccaattattcaaagatcaaggggttcaattgacctcaacaattaagacaacttatcagacctttaatcaaaacttgtggcggcagtatgaagaaggtacgttaacccgggaaatattattgaacacacgctttgcaaccttctttaaagaacagtttaatcaggaagttgatggaccaagattgtcccaaaattatttagacaacttggcattaggccatgatttaatgccacaagcagaagctctgttaaaggcgttaaaagcagctaacattaagctatatgtcacaaccaacggggttgccaacacgcaatatcggcggttacaagattcaggattaatcacatatttcgatgccgtttttgtttcggaagagttgggatatcaaaaaccagatccacggtatttccaaagtgtcttccaacaattagaggggatctcacaagcagaagctttgattgtcggtgattcacttacttcagatgtgcaaggtgggcagaacgtgggtgtcgccacagcgtggtataacccgaaccagctagcaaatcaaatgacagacatacagccaacacacgaaattgaacacttaatggacttattggcaatttaaaagccgatttgcggcattcaagaggagtagataaaacatgaaaaagcaacgatattttagaattagcctaggttggcgaatcttaattggaatcggcctagggttagtggttggtcggtttttctaccataatcaaaccgctatctcaatcttacaatcaattggaaccttgttcatcaatttaattaagatgattgtgttaccaattgttgtttcctgtttggtcgttgggattgccaagatgggtgatatcaaaaaacttggccgaattggtggtaagacgttattgtatttcgaagtgatgacgaccttcgcaattattctcggattagctgtcggcaatattgctaaaccaggagcgctgattgacattcatagtttggcacatggctcaattagtcagtacacagcagccgctaagaccgctggaaatcatggcttgggtgatatcatcatggatatcgtgccaacgaatttctttgcggccttggggtctggtgaaatgattccagtcatcttctttacggtcatgttcggtttagggttggcgacctttggtaaaaaggcaaccccgctcatcgatgcttttgaaatgatttcagaggttatgttcaagatgacaaactggattatgcagttagcaccaatcggggtgtttgcattaatcggggttacaattgcccaattcggatttgaagctttgaaaccattgctctatttcatcatcgtttgttacgcaacgatggcatttttcgtggttgttgtggctgggttggtcgcgcggatttggcacatcaatatctttgaaatcttgaaagttttcaaagaagaattggtgctagccttttcaacggcgagttcagaagcagcgttacccaaagtaatggaaaaagtgcaaaattacggtgttagtcaagggattgcttcttttgtcattccaacgggttattcatttaacttggacggttcggcaatctaccaatcgttagcggcgctgtttttggcgcaagcctatcacattcatttaagcctcacccaacaaattactctattggtggtcttgatgattacctctaaagggatggctggggtccctggtgcttcattcgttgtcttattagcaacaatcaccacaatcggcgttccggctgctggtgtcgccttcattgcggggattgatcggattgtggatatgggacgaactgccgttaacgtaatgggaaactcattagcagcagtcattattgccaagtcagagaacgaatttgatgaacaaaaatatcaacaatatatgagtggcaatgaacttaaataaagcaaagaccttaaatcaatcgatttaaggtcttttttgtataaaaaacgattttagcacaccgcaaacattagcggtatctaattataaaagcttaagtaatgcgacttttagcgcttttttgtcgattatctagatcaatttcgcagataatctaaaaatgattagacagattagaattttgtggtaaaattaattcagtaaagcgttttaaaaaataaaaacgtggaactgttaactcagtcaataatgtttaagccattatttttttatattaattgatagcgttttattgatgagtatgacaactatttttattaaggaggtttttgtgaatggttggaatcgttattgcaagtcacggggagtttgctaaaggaatcatgcaatctggctcaatgatttttggcgaacaagaaaaagtacaagctgttacttttatgccaaatgaaggaccagatgatttgaaagcgcatttagaagctgccgttgcaacgtttgatgcagatgatgacgtcttattcttagttgatctttggggaggttcaccatttaatcaagctaatgggttgttcgaagcacataaagataagtgggcaatcgttacaggattaaacttaccaatgttgattgaagcttacgcatctcgtttatctatgacatctgctcatgaaatcgcagcacatatcattgatgaagctaaagcaggggtacgggttaaacctgaagaactacaaccagaagaagcacctaaggcagaagccgcacaaacgacttcaaactcaggcacacctggtaagttcaaatatgtcttggcacgaattgattcacgtttattacatggtcaagttgcaacgacatggtcgaagacaactaacccaacacggattatcgttgtttcagataacgttgctaaagatgaattacggacaaacttaattaaacaagctgctcctagtggcatcaaagcacacgtcgtgccagttgatcaaatgattaaattggcaaaagatgaccaacactttggtaaggaacgtgctttgttattatttgaatcaccacaagatgcacttagagcagttgaaggtggcgttccattagaaacaattaacgttggttcaatggcgcactcaactggtaaagtgcaaccaaatactgttttggcttttgaccaagatgatattgatacctttgaaaaactaaaagctaagggcatcaagttcgatgttcgtaaagtgccaagtgactcaaacggtaacatggatagtatccttaaaaaagcacaagcagaactagacaaacaaaataacaaataacatcagaagaaattggaggattaataatcatggatttgaatttcattcaagtgattttggtcatttttatcgcatttctagctggtatggaaggtatcttagatcaattccatttccatcagccagttattgcttgtacactaatcggtcttgtaaccggtcaattactaccttgtcttatcttaggtgggacattacaaatgatcgccttaggttgggctaacattggggccgctgttgcacccgatgctgctttggcatcaatcgcatctgcaattattttaatacttggtggccaaggaaaagccggcgttacatcagctatcgctatcgctgttcctcttgccgtagccgggttattattaacaatcatcgtacggacattagcaactggtatcgtgcacatcatggatgctgctgctaaagaaggtaacttccgtaagatcgaaatgtggcaatatatcgctattatcatgcaaggtttacgaatcgctattcctgcaggcttaatcttagcaatcggtgctggccctgttaaagaaatgttgacagcaatgccaatctggttaacagacggtttagcaatcggtggtgggatggtcgttgccgttggttacgcaatggttatcaacatgatggcaactaaagaagtatggccattcttcgcaattggtttcgtacttgctactatctcacaattgacacttatcggccttggtgcaatcggtgtttcacttgccctattatacttagccctttcaaaacaaggcggctcaggtaatggcggcggttcaaatactggtgacccacttggcgatattatcgacaactactaagaaggaggctaacaattatggcagaacaattaaaattaacgcgtaaagatcgtatttctgtttggctacgttcaactttccttcaaggttcttggaactacgaacgtatgcaaaatggtggttgggcttactcattaatcccagcaattaagaaattatacaaaacaaaagaagaccgggcagctgctttagttcgtcacatggaattctttaatactcatccttatgttgcttcaccaatcatcggggtaactttggcacttgaagaagaacgtgctaatggtgcaccaattgatgatgttacaattcaaggggttaaagttgggatgatgggacctttggctggtatcggcgatcccgtattctggttcactgttaaaccaatcatcggtgctttggctgcttcacttgctatgagtggtaacattcttggcccaatcatttactttatcgcttggaatgctatccggatgtcattcatgtggtatacacaagaattcggctaccgtgctggttcaaagattacagaagatttatctggtggtattttgcaagacatcacaaagggtgcttcaatccttgggatgttcatcttaggttcgttggttaaccgttgggtatctgtcaagtttacgccagttgtttcatctgttaagttggacaaaggcgcattcatcgactgggataaattacctagcggtgctaagggtatccaatcagccttacaacaacaagctcaaggtttgtcattgacaagcaataaagtgacaacgttgcaagacaacttggatagtttaattcctgggttagctgcattaggattaacattattctgtatgtggttacttaagaagaaagtctcaccaatcgtgattattcttggcttattcgtagtcggaattgtcttccatctattacacttaatgtaaaagagtgcataagcaggcgcctatattttgaggattaactggatttgacgaattggcgatgcaatcgccgatttggcaaatttggttaaccgcaggaatatgcctactgaagcacgtttagaaaacaaaggaggggctaggacaaagtcaatttgtcctagcccctcctttttataaaagcgtataatgaaagtaagtttttggaaatggagtcgatattatggttcaatcgattaatacaaaggtggacttagtgattaaagccacgtcgtttacagcactctctgattatggacaaatcatgatcggggatagagggtttgaatttttcaatgatcgtgacgcacgacaatttattcaaattccatgggaagaagttgactatgtgattgcatcagtcatgttcaaaggcaagtggattccccgctatgctatccaaacaaagaaaaatgggacgtatacttttgcttcaaaggaacccaaaaaattgctccgcgccattcgcgagtatgtgcccgcagaacgcttagttcaatcactaggggtctgggatgtgattaagcgtgtgtttaaacgcaaatcaaattaacttcaggaaggtgtgaccaatattggtcacaccttttttgaatcgaattgcctgtgattttaattggtaccgatttgagtggcgtgctagaatatcatataaggttgattgttcaacattttaaaaaattaagttaaatgaggtaatgatcatgggatttgatgaagcgattaatgcaattaaggctggcaaaaaagtggtacggactggctgggatggtccagaattatttattttccaagtggccgatgggacattcgaggggcaagcaattagtccctacctattaattaaaacaaccgaaacaccagcatactcaatgttccaaccaacatcgtgtgatgtattggctgatgattggcaattggtcgactaatggggcattttgcagatttagcgactaaaaccattttaattaccggggcggcatcgggaattgggcgcgctcaagtggccgcttttttagcagagggggcattggtgttagcacttgatcgccagccgattgaagtccctgttgatagtcggtgcatcacagcgcaggttgatgtttgtgatgaaacgcaattaacaatgacattagcgactttgctggcagaatatggcccaatcgatgtggtctgcaacacggcaggtgtgttggatgcttatgcaccaacgcttgataccagtagtgcggattgggatcgaattatggcaacgaatttaaaaagtcaatatcttgtaacaaatgcgatcttgccaacaatggttgcgcaaaagcgtggggtattcgttaatatggcttcgattgctgggctagttgctggtggcggtggtgcgacttatacggcatcgaaacacgccatcattggctatacaaaacagcttgattatgattacgccgctaaggggattcgcgccaactgtatcgccccaggtgcgattgagacgccgatgaacgtagccgattttgcggggactggtgagatggcacaagaagttgcccgtcagacaccagcggggcgttgggcacaaccaactgaagttgcgagcttaagtgtttacttggcgagtgaggttgcggattacattcatggcaccgtcgttccaattgatggtggctggattgaaaaataacgctgactaaggagattatgatggcaaaacaaattaaattaagtcaaaccgtttatgaattggtaacggcctatcctgaagtggtgtcggtgcttgttgaaattgggcttgatggggtcacgaacccagcgcttttgaatactgcggggcgttttatgacattgcctaaaggagctaagatgaagcaaattcctttgacgacgattatcgctagtctagaagcacaaggattcgaggtgttagctgatgtgtgagcaacagcatagcagtgcgtaccgccaaaaacgaatcgtggaaatcttaaaaatgctgcatgaaggtggctcgtttgaagaggctaagcggatttttgatgagtccttttctggggttgacgtgtctgaaattacgtctgctgaacgggaattgattgccagtggcttgaacccgatggagattcaacatttgtgtaatgtccatgctgcggttttcaagggggcgattaattcaaatggggctgaaacgccggaacaagaacagccaggacacccagtcgctgtgatgaaattagaaaatttggtcatgaactcgctcttaaatgatgaattactgccatgtttgaagaaatggcagcagtcagggactgaccaaaattatctcgtgcggatgcaacaagcgttaaaagatttacagttgatcgaccgccactatttacggaaagaaaacttaatttttccgttgatggatcaatatgggattactgcaccacccaaagtgatgtggggggtggatgatcaaattcgggggttggtgaagacggcctatcaaatggtaactgcggaaccaattccggataaatatgcaattgaagcagccgttgaaaagatgagcaaagaaattcaagaaatgattttcaaagaagaagaaatcatgattccgatggttaatgaagtctttacaccagctgactggggactaattgcttctgaaagccaaccaatcgggtataccttaattccagacccattaccatggcaaccaagtgctgaagctatcgcggcggccgaaaagcggaccgtgccgaagattgcgcaagaactgaatgcgatggcgcaatcgttggcggatgcgcaaatgatgacccaaacaacgccaccagaaccgggcccctcttcgatagcagcagcgactaatattccgtttgaaattcaggggcaagtggcacccaaaaccgtcgctaaaaaggctgcggttaaaccagaaatgccagattttgtgaaggcaatgttagctgacgaaaaagaagcggcaccaaaagcgaaggttcaagcacgtcgggaagcaccacaaccccatatcgaaattggcgtggataaccaagctaaaatcgttctaccatctgggtcgatgaatatcagcgaattgacggcgattctccaagtactaccgcttgatttaacctttgtcgatcaaaacgatattgtgcggtggttctcagagaacgagcatcgtatttttccaagaacacgggcagtgattggccgagcagttgtgaactgccatccaccaaagagtgtggataaggttgagaacattttagcggactttcatgcagggcgagaagaccacgctgatttttggttgaacttccgcgggatgttcgtctatattcgctattttgcggttcgtgatccacagggacaatacttaggctgtttagaagtcagtcaggatttaacggaactccgtgcactaacaggcgaaaaacggttataaaaatgcattaagaggagaaaagagatgcaacaaattattttattacttgccgtcggtgttttagccggcgtgttgggttcaatcttagggattggtggcgggatcattgtaacccccgtattaacgctagcgattggcctagatattaaatacgcgattggggccagcattattgccgtgattgcaacaagttctggtgcaactatcgcctatttgaaagatgatatgctcaacttacgagtggcgatgttcctagaaattgcaacgaccgtcggggcgattatcggggcgttattgaccggcatcgtaccaactggattcttattcatcttattcggcgcattcttgctattttcaacgtacaacatgattcaaaaattacgtggtaaagttgcagaacaacacgtcggcgctggtgaagataagtgggccaagaagttgaacttaaatggcacttactacgataaggccaaccaagaacaagtcgactacgctgttgaacaagtaccaggcggctttgccatgatgttcggggccggcattgcttctggcttgctcggtatcgggagtggggtattcaaagtgaccgccatggatacgattatgaagatgccattgaaaccatcaagtgccacgagtaatttgatgatgggggttacggcagcagcttcggccactgtttatttcttcagcggtgcgattattcccagcgttgctgcaccgttagcaatcggaattttggtaggttccactgtgggttcacggattatgcagtatttgcaaccacgtgtgattcgcatgatttttatccccattttgttatacacaggtttacaaatggtgcttaaaggattcggggtgcatatttaatgacagataaaaaagcagagatggctcaaattgaactcgtcatcggtaaaattttacgcattggggtggcggtttcagcaacgctgctcattattggcatgttacttgcgattattcatggcggtacaggttattcagaatatcaatttccaacgacctttaccgaaattttcagtggcattgctgcatttaaggctggcgctgtgattatgttgggcttattctgcctcattttaacgccagtcttgcgtgtggtggtatcaatctacgcatttgctaaagaaggggattacctctacgtttggattacggttattgtgttggtcatcttaatcatcgggatggcaattggttttataaagaaataaagagtggtttattagctcagtatctcgcgaggattaaaaaaagggccaacgacaaacatgtttgtcgttggcccttttttttgtggtgaattaggctaatccgcagaagataaccgggcttactgcgcactctgatttaaaacgtgctccgacagacatccgcttccggttagctacgtcccgcaaacaatcgacgtcgtcgcttattcacgagattaggctaatcctcagcgtataatcgtctgccgtcgcactctactttgaaacgtgctccgtaagccatcttcttccggttagcgacatcagtcaaatcaccgactttgtcggcaatccgcctgattaagctaatcctcagaagataaacgggcttactgcgcactctattccattcctagtattcttttctttttttcttcgaattcttcgtgggtcattaggccatcgtcgcgcattttgaggtaggccataatgagatcaccagttttaacgtaactgaggtcttcttcttcaacggttggtttttcgaggaagtcagctaaggctgtgtataacttgcgcacagcaaggttatcggcgggttcaaaactgatgacaattttttcgagggcgtggttgggtttttggtagagaatttggagatgaccatgccgataagtcgcttcaaaaaagcggactgattttaatttgctaaacggaatgtcacgatcctggttttgtttcttcttaaacagtccgggatagtgaattgttaggatattttcgtcataggttaattcgagtttttgaggttttttaatgagataagtttgcatcgcttgctcctttaatcattcttaagtaaaagcacggtagttcttaataaatgaagcctaaacttacctttatcatagtagacagtgaccctaaatagcaagctgtttgtattggtttatgaaatgaggtgggatgatgaaattctttataggtattcgcaacggcctgttagtggcattaccgatttggtgtttaataatcttctcaattacgtattggttacgctaaaataaaaaaacgggcgccgcacaaaaactgtgcagtgcccgttttttaacgtaaattggctgttttttaggtctaaagacggtttttatgctagtatgaatagattacaattagtgacattgattgcatctaggcgatgtaattattataatgaaatcaaatgtccaaagataaggaggaggaaaccaattgaatattgggatatttacggacacctactttccacaagtcagtggtgtggcaacctccattaaaacattaaaagaagccctagaaaaacaagggcattcggtctacatatttacaacgaccgatccacatgttgacaaagatgcagtcgaaccgaatattttccggtttgctagtgtcccgtttgtctcatttacggatcggcgaattgctgtgcgcggcttatttcacgcttatcaagtggctaaggaattggatctcgatatcgtgcatacccagaccgaattttcgatgggctacatcgggaagtttgtcgctaaaaatttaaaaattccttgtttacatacgtatcatacgatgtacgaggattatttacactatgttttaaacgggaagttattacggccataccatgttaagcaaatgacaaaggcctttttatatcacatgtcaggcatcgtggcaccatcagagcgggtttctcaaaccttaaatggctatcaagtgaaggcccccatccggattattccgaccggggtcgatattagtcgctttgagcgcgaagtgacccgcgacatacgggccgaattgggcttgacgccagaacaacctgtgctcttatcattgagtcgcgttgcttatgaaaaacggattgatatcttagttgatgcgttacccaaactagtcgcccaaacaccagatttaatgttagtgattgttggtgaaggtccagctcgagaagatttagaagctcaggttgccaggttaaacatgaccgaccacgtgattttcactggaatggttgataacgatgaagttgcaaattattatcatatggcgaatctttttgtctccgccagtgactctgaatcacaaggattaacttatattgaagcgatggccgctgaactcaagattgtcgtcatgacaagtccatatgcggctgagttattaactgatccttcaattgggacgacatttacgaacgaagatgaaatgatccatcaagtatcgaattatttgaatcatccacatgcatttgatgatccagcaccgcgccgaaagaagttgcatgctatttcggcggattactttgcggaacagatgattcatttctataagcaatcacagctattatatgacgaattaaagttagaccaagatgatttattggaattagaagatttagatactaaaaaataagtcgcgttggcggaaaactgttgatcatttaatcaacagttttttcatatcgttgctaataacaagaaaaagggtcgtttatgagtagaacgaataagattgtttttgcagtcatgctgttgattgggtgtgggatttttgcctatgaaagtcgcacgctggcgttgaaacagctgtttatcgatattagtcatctgaaactttggtggctgttggtcgccttattatgtatgttaatttcgtggtttttcgaagcacttgtcttacgcgtctttctaaaagaccgcacagaacacttttctttatacaatgcgcttcggattccgttgattgcacaactattcaatgcgattacaccgttttcttcaggtggacaaccggcacaactggtagcgttgatgcaatcccgtgtagaagctgggcaagctagctcagtactgctgatgaagtttattgtttaccaattcatggtactggtgaatttcttattaagtatgatgattggtttctcgcaagtttccaagcattttgggacgctgtcgattttgattactttcggattaatcgtgcatgtggttgtgttagccgtattgttgctaatcatgtattacaatcgatttacgaaacagttagtgcactggttattaattccggtgggctggttcgtctcccaaaaacgggtgacggaatggcggaccatgttaatggccaaaatcgataccttttacgcggagagtctacaccttaaacgcgagaaaaagaaactaatcaagggctgtattttaacccttgggcaactttttttctattatagtgtgccatactttgtcttattggcacttggcatcccgcatgttaattatttagaggtgatggtcttacacatcatgattgtcatgattgtctcgctctttccagttccaggcggttctggtggggcagaatatagttttaagacgttatttgccacttttatcccgagttcaagtaaactggtgttaggcatgttgctctggcgattgtttacgtactatctcgggatgttcatggggattggggcgttagcagttaaaccacgagtaactgataaaaagtaggaggcgtttttgatgcaaccaacaattggcttcattggaacaggtgtcatgggtagtagcatggtcaagaatttattgaaggcagactatccagttgtcgtgtataaccggacaaaacaaaaagcggatgcagttgtggcactcggtgcaacatgggctgattcaccagcagcggttgtcgcgcaaagtcagattgtgttatcaatcgtcggttatccgcaagatgtcgaagccatctattatggtgaagacggaatttttagtgctgcacaacctggtcagattttggtggatatgacgaccagcacgccaacattggcgcagagaattgccaaaacagcagctgacaaaggtctgcaagcattagatgcgcctgtttctggtggcgatatcggcgcccaaaacgggacgttgacgattatggtcggtggcgatcaagctgcctatgaaacggcattacccgtttttgaagcaatgggtaagactgtccatcgcttcggtgctgccgggacaggccaacatacaaagatggccaatcaaatcatgattgctggcacaatgaccggaatgacagagatgttagtgtatgctaaagcagccggattagaactagaagcggttttaaacacggttaatggtgggagtgctcagaactggagccttgcaaactatggtccacgtattctagcgcaagactatacaccaggctttttcgcaaaacattttttaaaggatttaaagattgcattaacggaatccgaaaagatggggctccatttaccagctacgcttcaagctaagaaactctatgcgcagctcgttaatgataaacaattaggcgatgatggcacccaagctttaattaaattatggtggccttctgcaaaataattggatataaacggtgcagaagtgctctttttctgataaactgatagttagttattaaaggaggcttcgccatgcaatcatcacagttagttgcgattatcaaacgtctggtagcaatgcaagaagatcaaagcgctgaggttcaagaaagacgttttgaaaaggacggcgatttaaaagcaactgttagctatgatcctcaagctcaagcatttgaacttgaagacagcaacacacatcaacaattccaatttgacaatattgatttagttgcaatggaactatacgatttattagcagactagttaattaaccattgagtatcgaattacttgatggtttttttgctacttaagcaggtgatagtcttgctcagttgcgactcagattattaaaaatggtttaatatttggcattcaagccggttacatattgcttttcatttcacggatgtgtaaactaactttcagattgtcaacggcttttaaagcccaacgacctttaacggaggctactgtatcgatgaaacaaattggtcataaaattcaatcaggattaagcacacgatggggattcttccttttcgcagttgcgctattctggcttaaaacaatttacgcatatcaaacaaaatttaacttaggcgtcaaaggtggcatgcaggccttcttaatgacgattaatcccattccaacaaccttattgctatttgggattgccttgtttatgaatggccgaaagtcatacattacgttgattattattgatttaataacctcaacttggttattctcgaatattttgtattaccgtgaattttcagacttcttaacgtttaacttaatgaagggctctggtgcggtatcaaataacttgggcaagagtattgctgggattattgaatattctgatttcctagttttcgctgatgttttattgctaatcatcttattggctactaagttagtgaagattgatcaccatgtctttatgaagcggaatgcatttgcaattactgggttagctgttgtgttattcggtgccaacctcgggattgcagaagcagatcgttctgggttattaacccggacgttcgataacaactacatcgttaagtatcttgggatgaatgcatacactgtctatgatggcgtgaagacgaccaagaataatgcgattaaggctaatgctgatagtagtagtatgagcagtgtcttgaagtatatgaaggacaaccgggttgcacccaatgttgaatacactggcgtggctaagggtaagaacgtctttgttatccatttagagagtttccaacaatttttaattgattataagtgggacggtcaagaagtcacaccaaatatcaataagctatatcacgaccaaaacaccctcagtttcgacaatttctttaaccaagttggtcaaggtaagacggctgatgctgaattaatgctcgaaaactcattgttcgggttacctgaaggggccgccatggtcactcaagggacaaccaataccttccaagcagcaccatcaattctagatcaacaaggttacacaaccgcttcattccatggggatgtgccaagtttctggaatcgggataatacctacaagtcatggggctatgattacttcttcagttctcaatactttaaagaaggtaaaggctacaacgtgggttatggcttgaaagataagatcttcatgcaagactcagcccaatacattgaacaattaccacaaccgttctatgctaaattaatcaccgtgacaaatcactatccatacttattggataaacaaaatcaatcaattgctaagaccgatactggtgatgatacagttgatggttatgtgcaaaccgctaagtatttggatcaatcaattggtgaattcttagcttggttacaaaagactggcttagataagaatagtatgctcgttctatatggcgatcattatgggatttcagggaaccataagaaggctgttgcgaagttattgaatcaggataaatttactgattttgataatgcgcaattccaaaaagtaccgttcatggtgcatatggatgggttaaaaggtggcgttaaccatacctatggtggtgaaattgacgttttaccaaccttattgaacctattaggtgtaaaaaatgacgataccatccaatttggttcggatttacttgcgcctaaccgcaatcagacggttgtctttagaaatggggactttgtcacaccacagtatacgaaggtaggcagcacctattacgatacgactaatgggaagacgctgacgaatttaacggcagcgcagaagaagcaattaacggcaatcagtgaacatgtaacggaagaattgtcactttctgacaaggtaatcaccggcgatctacttcgattctatacaccacaaggattcgaaaaaccagataagtctaagattagctacaaggtgaaagatgctaaagctaagttgaaagacagtaacaataaaacgagtgttatccagcaaaataatggtaagtcaacaatggacctttatgaaacggatgcacctgaattgaagtaaagtatgtaaagacgttacgggactcgcgtaacgtctttttttgagcaaagatacttgtcagtctcgtcaaaaaaaggtacgattacagcaataaggatatatgataatgattatcattagcgaaaggtggtggcaaaatgagtcacatcgtgcaacaaacgttacggaaactcaaagaacacaacgtacggatcacgccacagcggcaagctgttttggaattcatgattggcactcatatgcatccgactgcagacgatgtctataaggcgctagcagggcgctttccgaatatgagtgttgcgacaatctataataacttgcgtctgtttacctcattagggattattgaagaaatggcttatggagatgcatccagtcattttgattttgcgcagaccaagcattatcacgctatttgtgagaactgtggaaaagtagttgatgttttttatccggagttagatgatgtagaagtgattgctgagaatctaacggggtttatggtaactgggcaccgaatggaagtgcatggtatctgtccagaatgccaagcaaagcttgcaaataactaagttgtttgaatatttaaaaaaaagatgaattttatgcaaattttacttgacgatagatttagatgttggtatagtattctatgttgtcagcgagagaaaagctcatcgctaacgaaataacgggtcaaacgagattgaataaatattcagaaaatatttataaaaatagtcaatataaaaacccccgatattggattttggtccaatatcgggggttcacttcaacggttcttttttagttatttgaaatagtcggttaagccggtataaacggcatcagcgactttagcttggtaattagcactgctaatataactaaagtctttatcagaattgatgtagccgagttctaagagaacagcaggccgttgattatcgcgaaggacttgataattgccgtattcaatgccgcgattgttaagcggtaatgtcttagtctgattgttgatggccttcgcgaggctcatatccttactgcttgaatagtagtaggttgttgtcccggatgcttcattggcttcattgcttgaatcaaaatgaacgctgataaaggcatcagcctttaatttattggcaagagcaggtcgcggttcgagatcgacaaaactatcatttgaacgcgttagcacgacgttagcaccagccgcttttaattttttagcaatcgcatcgacggtcgctaatgtgtagtctttttcatacttagacttagttgaaagtgcaccgacgtcggtgccaccatgaccagcatctaaaacaatggtggcttcagaaagggaagtagcgctagtcttaacaacttcattcttctcagaaggagtgacaacccaacttgcgacgtaaccggtattaccatcggcatctttaacttgataccaagtaccactcttattgatataagttagcttggtattggccgggtagctttgggtatattgatacgaaacatcaggaccagtgcgtagcttggtattatccagttgggtggtcactgatttaatcgcggagctacttgtatcagtatccgtagactcagattcagcggttgtcgttttttgaacagtcgccggagcttggtcggaaacttcgattaaatcactttgtacccaaccaactgctgagttgtatttaatctggctccaaccgttttgttggtataagactgtaatttcgtcaccttgatttaacttaccgagtagttgactatcggcactactgctttggcggacattggcaaaactgttggtgaccttagcgactcggtttgaagtggcactgacttcggtgttatcgactaaccagctagcaacccagccaatcttatcaccacttaagcgcacttggtaccaattattcttttgtgagataacattcattgtttcgcctttattggcttgactcatgacatcataagataatccagggccttggcgaacgtttacgacgttcgctttaatcgtaatttgttggtaagcagccagcgcgtgggtcacaaagagaccgacaaaaacgagtaatgctaatataataacggccggatagtgtttaaaccagctcaaaggtttctgcatttttttcaacacctttgttatgttttattaatttataaggttaattatagcaaaaaactcaactttctaaagagtttcagcgaaaaagttacaaaaaattcaagattgattgacttttttttgaaataacgttaatcttataacaataagaataagtgatgaccagtgataaagtaaaggctaagccccctacgacagagatgatttcacagctgcaagaaatcaatggcacgccgagactgcttttgaggtctgtgtggtcgcacaccgttggcaacaacgttatataattaagctaaaattaaggtggtaccgtgcatttaagcacccttgttcaacgacaggggtgtttttttatttggtatccatttggaggaatgatcatgggctatcaaaagccaaaaggaactgcggatattttacctggagattcaaaccagtggcaattagtggagaaaacggcacgcgacgtttttgcccgctatcaattcaacgaaattagaacaccattatttgaaagctatgatgtcttttcacggagttcaggcgatacatctgatattgtcagcaaagaaatgtatgatttcatggataaaggggatcggcatatcgcgctgcgtccagagggcacagctggagttgtacgggcgttcgtagaaaataaactttatgggccagaacatcaaaaaccttataaggtgtattacatgggaccaatgttccgttatgaacggccacaatcaggccggcaacgccagttccatcaaattggggtcgaagcatttggttctgagaatccagcggtcgatattgaagtcattagcatggcgatgcgtttattacgtgaatgccatattacggatttaaaactggccatcaataccttaggggatgcggaaagtcgcgcggcttatcatgaagcccttgtcagctatcttgaaccacattttgatgaattaagtgacgattctaaagttcgtctacacaagaacccattgcgcgtcttagatagtaaagatgctaaggaccaagaaattgtgaaggatgcacctgttattttggattacttaacaccagaagcaacggcgcactttgaaacggttaagcacttacttgaaacattgcacattccatatgaagtggatactgaaatggtgcgcggactcgattattacaatcacacaatttttgaaattatgacaaataataaggtgcttggtcgcggctacacaaccgtcttagccggtggccgttataatgggttagttgaacaacttggtggcccggacatgccaggggttggttttggcttaggcgttgaacgattattattattgatgaatgcgcaaaacgaagcgttggttccagaatctaaactcgatgtgtatgtcgttggaattggcgctgaaacaagtgcgacaactctccaaatcgttgaaaagattcgtgatacaggtttaaccgctgatcgagactatcttgatcgtaaaccaaaagcgcaatttaaaacagctaataagttaaacgcccaaatggtgattacaatcggtgaatcagaattagctgatcaaacagcacatgttaaagacatgattagtggtgttgaaattacggtaccacttgctgaagtctatgctgactttaaagcagtgcaacaacagttaaatcaaaattaacgcatataagatgcctcaagagtaaatttgaggcatcttttttatttgatggcagtcaattcactttaatcctcaggaaatcccagactgtcagaacactctgagcatatttgtcgctatctgtttgtatctgcttataataataaacacgaaggagtgatggatatgacagatgatttagaacaacggttaacgacggaacaatatgcggtaacccaacaaaatgcgacggaggccccatttaccggtgagtatgatgattttgatgaacaaggcatctacgtggatgttgtcagtcatgaaccattatttagttcgttagataaatatgatgcaggctgtggttggccctcatttacaaagccaattgcgcctttgacggaacgccgggaccaatcttatgggatggaacgcgttgaagtccgtagtgaagaagctaattcgcatttagggcacgtttttaatgatggaccgcaagaagctggtggattacgctattgcatcaactcagcagctttaaaatttattccagtcgaacaactcgaaaatgaaggttacggtcaatatctaagcttatttgaagagggggcacaataatggcaactgatacagcaatttttgccggtgggtgtttttggtgcatggttcatccgtttgatcagcaaccggggattatcaaggttgtttctggttataccggtgggcatgttcctaatccaacttatgaggaagtttgctcgcatacgacggggcacactgaagcagttgaaattacatttgatcccgcgattatttcttatgcggaattagttgaaatttattggcgccaaacagatccaaccgatgccatggggcagttccaagatcgtggcgatagttaccggccggtgattttcgttaactcgcctgagcaacgtgcaatcgcggaagcttccaaacaagcattaatcgatagtggtcgcttcaacgaaccgattgtcacgcaaattgaggctgccaaaccgttctatccagccgaagaatatcaccaagatttctataaaaaagaaccatttagagcagaattggtcgaggggacacgccgtgctttcattcgtgaaaattgggcgcattaattccaagaaatcctttagtattcacaaatggtatgctagaatgaaagacatcaaaagtggataggtgtgatattcaagtggacgatttagctcggaaacatcaaaatatggcgaagatttcggcagccattttatacggaatttgtgtgtcgattgcattgaactttttctgggaagaaggtggcatttacgcctctgggattaccgggttcgcgcaattcattcatacagtgacgtcgaaatttatgccgtttctaccatttccattatcaacgtcattgatgttattcgtgttaaatgtgccattatttattcttgcgtggttcaaaattggccaccatttcaccatttatacgtttattgcagttgttttttcaagtgttatggtacagattatgccctttacacagctaacggctaatccgattatctgtgcgatttttggggcggtaattaacggttttgggaccgggatggccttgaaaaacgatatttccactggtggcttagatatcattgggattgtactgcgcaaaaaaaccggccgttcagtcggttcaatcaatatcatgtttaatgtggcgctcgtttttgccgctgggttcctctttggttgggaacatgcgctctatagtatcttgagtatttttgtcaacggcaaagtcatcgatatggtttacacgcgccaacaaaaactgcaagtgatgattattaccgataagtccaaagttgtgattcaaatgattcaagacgaaatgcggcgtgggattacgattgtccacgacgtagaaggggcatataaccgtgaagaaaagacgatgttatttaccgttatttctcgctttgaaatgcatgatttagaaatggtcatgaaacaagcggatgaccacgcattcgtcagcatgacggaagctgtcaaaattctcgggcatttctatgaacctaagattaaataagataacccgccattcaattgaatggcgggctttttttatgggttaggtttcgtcttgctttttgttgcgctttctgtgacaatctaggtaatcaaaatgcatggaggtagtggaatgttattagggagtcacgttagtatgaagggcaagcagatgttactagggtcagcggagagtgcagttgattttggtgcaaatgccttcatgatatataccggcgcgccacaaaatacgcgccgcaaaccaatcgaagaattaaatattgaagcagcaaaaccctatattgaagctcacaacttaggtccaattgttgttcatgcaccatacatcgttaatttagggaatacagtgaagcctgagaacttcaagtttgcggtctcttttttacaagaagaagtgttacgcgctgaagcattaggggccactcaaatcgtcttgcatccaggtgcacacgttggggcgggtgcagatgctggtattcaacaaattatcaaaggattaaacgaaattttacgacctgatcaaaccgcccaaattgccttagaaaccatggcaggtaaaggaaccgaagtcgggcggtcatttgaagaacttgcacagatgatcgatggcgtgacttacaatgaaaagttatcagtgacgtttgatacttgtcatacaaatgatgccggatataatgtgcgtgaagattttgacggcgttttgaatgaattcgatcacattatcggtttggaccgcttaaaagttgttcatttaaacgattctaagaacccacaaggcgcacacaaagatcgtcatgccaatattggttttggtgaaatcggatttgatgcgctaaaccatgtcttacagcatgaacaactcgttaatgtgcctaaaattctagaaaccccatatgttggcgaagataagaagcataactttgcaccatatgcgtatgaaattgcgatgctcaaagcggggcaattcgaccctgatttattaacgaaggttgagcagaacgaaggcaaactatgaatttaaaacgaactaagtttggtatttttatcttaatagcggcgttttggacctttatttttagccagccagtccaggctgccgatacctatgacatcagtcgttatcaggtaaacgttgatgtacaacctgatgggagtgctcaggtcgaacaaaaaacggtgtttgatatccaagatgatatccatggggtctatatcaaccagaatctccaaacaaacgttggtcaaccaaagaagttggttaacccgcaagtcgcagttaatggtcatccgtttagtcaaagtgaatcaggtactgaaggcacctatagcttaactgatgcacaacaaaattatcggttcaaactataccaaactgcacaagatggcaatcaattagcggttactttgaaatatcagttacaaaatctgattattaattatcgtgatacggcggaattgaattggaaagtgattggcgatgcgtgggatagtgacttacaaaacgttcaagtggtaatacaattacctaccacattcaaaaaagcagacctcaaatcatggacgcacggcaatttagatgggcaacaagtcgttgaacccgataaaggccgggtaacaattaaactcgctaataatccagcaaaccaatttgtcgaaagccatattatttttccaacggcggtgactgcggcgaatccgaatcagattgatcaatcacgtcgggaagccattatcaaacaagaagcgcgtttggcgcaacaagctaatcaagaacgcaaagcacaaaaacgccgttattggcttttatctataggagcagtggtcttagcgcccggcatgttcttgttaattttacgtaaaattcgaaaaacgcttcctgtgatgacttatactggacaggcaccagaacacgtctatgatttaccagatgaaaatgggcctgcggttgtgcgtcagttgttggcattaccaattacggagacagcaggggcggagagcttatccgcaacgattctagacttagttgctcgaaagaatctaacaattgatgttcaggaaccaaagaaggaactattccataaaaaaacgccgcaattttcattaacgctcgtcaatcgcaatcagttatcacattcagaaaagaagttagttagctggctatttgatgtgattggtgatgggcagcatgtcagtctatttgagattgagaaatatccaaaacggcatagtgcaaaactgttcaatcaacattaccatgggtggcaaacagcagtggcgactgaagcaagtcgtagcgggtggttacgagaacacatcgctgagttaatgaccagtttgaattattggttaatcggccttggcgccctatttttaattttgatttttggtgctttgattggcttagttgcttggtggacgctcattccgatggggcttgtcttcattttaaccgtctggcgtagatttaatttgcaactatggacgcaattgggttacgaaaaacggggcgaatggcaaggctttaaacaaatgctaaaggatatttcgacactcgatatggcgaatgtcccagatgtactattgtgggatcgatatttgagttatgcaacggccttcgggattgctgataaggtcgttaaagctttgaagattcgattgacgccggaacaacttcaaacaatgcctctgggttattattattactacgggtatactggggggttgaacatcggtcaatcctttacaacagctctcaatagtagtgttggcagtgcggtcagtgctgctaatccaacaagtgttagtggtggttctggcggcttttcaggcggctcatcaggcggtttcggtggcggttccggtggtgggactttctagtccaatcaaatgattaggtgaaacgccaacacactggtattatgagcgttattaaaatgtaattaacgcgctaaataagtgttagttggaggaggaaagcacatggagtttaacgatgtggttaatcaccgcaaggcaattcggtcatttgacccaaacaaaccgatctcggatgaattaatcgaaaaaataatggtgtccgcccaacgaacaccgtcgtggacgaattcacaaccttggaaagtctatgtagcgacgggtgaaacgttagccgatcatttagaacgaacgggaaaccggatgaaaggctactctgatttaaacgtgattcaccggacagactggggaccgttaatggctgagaacagtcgcgtgtggaatgatgaaatcagtgcctatcttggcgaagacgggttagcgaattttagcgatttacaacgccatctgttcaacgcgcccgccgtgacttacttgacggttgagcgcaaagtttcgccatggatgatttatgacatgggggcttttagtcagtcgattctgttagccgcggctaacgaacaagttgatacaattcctgcctatgaaacggccaagtatccagatgcggtccgcaaagcaatgggtattccggaaaatgaactgttgattggtgggattgccatggggtaccgtagtgaagggatgattaatgcgtttcattcgcagcgtagttcggttgcgagttttttaacgattaaacattaacaaattaaaaaagcgttcaaatcgatttcagatttgaacgctttttttaattgacgtgatcgttcgcactgcccgcaaaatcgaggcccatgcgttcaagaataattgtggcagtttcttcgatcgaacggttggcaacattaatcacttggcaaccaatcttatcatacaggtcttgggcgaaagccaattcagctttaatttcgcccatgtctgaataagtggtatcaggatttaacccataagcaatcatccgttcccggcgaatgttattgaggacttctggtgtattcatcaggccgataattttcttaggatcaacccgccagatttcgtctggaatgtgcgcttgtggcacgattggtaagttggcaaccttgatattccgattggctaaaaagagcgacagcggcgtcttagacgttctagaaacaccgagcaacacgatatctgcttctaagaaaccgtgggggtctttaccatcatcgtacataacagcaaattccatcgctgaaatgcgatcaaaataacgatcgttcaaatgatgtagtgccccagcttcaccagttggcgtgctgttggttttagcagtaatcatttgtgtcattggtgacatcatgtcgaaactggcaatttttttcgcttggcaataggtttcggcgatttcagaaagaccgttagtggctaatgtatggaccacaattgtttcttcaggaaccgctttgcttaagacgtccatgagtttctcttgcgtgtgaacgaaggggaagcggacgagatcaggtttaacgtccggaaattgggcgagcgctgcttgtgctaattggagggcggtttggccgactgagtccgaaagcacaaaaacggttaatggtttagattctggcataaggcatgctcctttattcacttttatagcgctatcataccataattatcgaaaaaatcgctagatttgaaaaaatattcaattaattccctgtgggttattgaccgtattttcaacattcgctataatagcaaagaacggttcacgtgaagttaaatttttaacgaacgtaaacggttatacttagcacgcgaggggagggatatcatatgggcaagacagtcgttcgcagtaacgaatctctagatgatgctcttcgtcgcttcaagcgttccgtatcaaaagctggtacaatacaagaatatcgtaaacgtgaattttacgagaaaccaagtgtaaaacgtaagttgaaatcagaagctgcaagaaaacgtaagaagttctaatttcttagataaaggaaatgattgaatgagtttacttgaacaactaagttctgatttgaaaacggcgatgaaggccaaagataagttgcgattagctgttattcggagtttaaagaccgctttaactaacgccaaaattagtgcggggcaagacttatcttctgacgaagaattaagtgtactatcatcacaacttaagcaacgtaaggattcattagctgagtttgaaaagggcgatcgtgcagatctcgctgaacaaacaaaagcagaaattgaaatcgtacaagcttatttaccagagcagctagatgaagcagcagtggtcaccattgttgacgaagcaatgcaggctactggtgcgacaagtaaggctgactttggcaaggtgatgcaatatgtcatgcctaaggtcaaaggacgagctgatggcgctatggtcaatcaagtcgttaaatcaaaattaagttaattttaggcgggacttcctctggggagtcccgctttttttttatggtcgttaattcagattttgataattgaccataaattcgtgaattagcgcggctggctacttttaaaacggttgttgtttgtgatagaatgatggtagttttcattctaaaacaaatgaagttgaaacgtgcggttgcaacttgattcttcactttacgacgtgtagttaataatcgactaaagtcgtttattttctgggctagataatactcagaatcagttgcagtcacactctggaaggagttatctttgttggctgaaacagatgagcgtttatttcaattggcaacgccaaatttagcggccgctttaatgggcacacacgatacttttttaaaaatcatcgaggaaagcttatctgtcgaactgattgcgtttgacgagcatattaccattcgcggcgaacaaccagcagttgaccaagccgcttctgttttagaaaacttagtggcgctgttacaacatggcattaagctcaatagtagtgatgtggtgagtgcgacgaagatggcccaaaaaggcacgattgctggtttccaagaactttacacggagccattaatcaaggatcgtaaagggcagcatattcgcgtgaagacattcggtcaacgtcaatacgtgaatgcgattcgtcaaaacgatgtcacgtttgggattggccccgccggaacggggaaaacattcttagccgttgtcatggccgttgcggcgttgaaacaaggattagtcgaacggatcattttaacgcgtcctgcggttgaagctggtgagagtttaggctttttaccaggtgatctaaaggaaaaggtggacccttatttacgaccgatttatgatgcattgtatgccgttttgggtaaagaacatactgaacgtttgttagagcgtggtgtcattgagattgcaccgcttgcgtatatgcgtggccgaacactagaagaagctttcgttattttggacgaagcccagaatacaacgcctgctcagatgaagatgttcttaacgcgacttgggtttaactcgaagatgattgtcaacggcgatattagccagattgacttacctaagaaaacaatgagcggcttggtgcaagctgaacatattttgcacgatattcctaagattgctttcgtacagttcagttcagaagatgtggtacggcacccagttgttgctaagattattaacgcctatgcggcgattgaaaagatgagaaagtaggaacacttgaatggatatccaaattatcgatgaaacaaaagtagttgcagaagcaaacgtaaaactggtcacggatattttagaatatgccgggcaacaattagatttacctgaagacacagaaatgtctgtcacgtttgtgacgaacgaacgcattcgccaaattaacaaggaataccgcgatactgaccgtgcgactgatgtcatcagttttgcaatcgaagaagatcctgaagaagaaggattaccagccaactttgaagaactattcgacattcccaagaatatcggtgatttgtttgtttcattagaaaaagcagctgaacaagctgaaacttatggacattcatttgaacgtgaattagggtacacaatggttcacggcttcttacacttaaatggttatgatcacattcatagtgaagatgaagcacaaatgattccattacaggagaagatcctcgatgaatttggattacaacggtaaaaaaccacaaacgggcaagaataaacatttttggcagtcactacgccacgcactcggtggattatggaccgcctttaaaactgaggctaatttacggcgtgatgcctggttttcactcgttgcgattgctttcggtatttattgtcagttacattatttagattggttagcgattattttcgcgatttttatcgtttttatggctgaattttggaatacagttatggaacatctcgtggacttattagtcgatcaccagtaccatccattggctaagcagattaaagatatcagtgcagccagtgtcttaatcagcacaattttagcgctattgattggcgccattgtctttggacacgccatatttaactaaaaaggggactattatgtcagaaacatatcgctcaggctttgtggccattgttggccgaccaaatgttggaaaatcaacttttatgaatcgaatgatcggtgaaaaaattgccatcatgtcatcaaaagcacaaacgactcgcaataaaattcaagggatctacacggatgacaacgcgcaaatcgtgttcgttgatacaccagggattcataaaccacataatgaattagatgaatacatggatcaagcagcgctatcgacgtttaacgaagttgatgccattttattcatgattagtgggattgataaaaaagggcctggggatcaatacatcatggaccaattgaagaacgtcaaaaaacccgtttatttggttgttaacaaaattgacgcgattcatccagacgatttattaccaatgattgaacaatatcggcatgaattagatttcaagggggtttacccaatctctgcattagaaggtaacaatgtccctgaaatgttaaaagaattggaacaaatactcccagaaggccctcaatactacccagaagatcaattaacggatcacccagaatatttcgttgttggtgaattgattcgggaaaaaattcttgaattaacgcatgaagaagtgccccattctgttgccgtggttgtggaacggatgaaagaccgcgtcaatggtaagctccagattgaagcgaatatcattgttgaacgtgatggtcaaaaacggattatcatcggtcaaaagggctccattatcaaagaaatcgggattcggtcacgtcgcgaaattgaagctttacttggtgaaaaagtcaacttgaagctctgggttaagattcaaaagaattggcgtgacaataaccaatacctccgtgaatttggttacaataaaaagagattgtaggcttaagcaatggcggaacatcgattcgaagactttaatggtctagtgatgtatcggaagaactataaagaaaaagatatgctggtcaagattttgaccgatcgctttggcaaaaagatgttttacttacgcggtgcgaataaaccgaagtttcgcttgagtgcggctattttgccatttacccaagctgagtacggtggcgacattcgcgatgatggcttatcctttttaaataatgtcaagtcggcgagtcagtttcaatcgattagcaatgacttgtttttaaatgcctatgcgacctatatcttaggcttagtcgatgttggttttccggatagcgaaccgctcggcagttggtatccgaagattgaacaggcactctcattaatcgatgaaggctttgacgcggcgatgattacgcacattatcgagattcagatgttacaagtcttcggggtgcagccacaactgcaagtctgtgcggtttgtgggcgttctgatttgccgtttgattattctgagagttatggcgggctgctttgtcaacgccactggcacttggatgttaatcgattccacggtagtcaacgggctatctattatctgcgtcttttttcagtgattgatttattcaagattcaatcggtcaacgtcaaacagacaacgcagatggagcttaagacgatgatcgaccggatttatcaagacacggttggcctatcgctcaagagtaagcaattcatcgataagatgtacagtttcgatagtcaattaccacaattaaaaaaagtgtcgtcagaaattgacagcacgccaaaagacgactaaaatagtaatcaacttaatagacgttgaagaaaagggtcccttaagacggtcagacagtgattctaggtgagtgagaactagaacaagacttgagtggattggcgtttcggagtcataccaatgaagcagcagctcgctttgagctgaagtagggtggaaccgcgagtaatcgtccctatgtgacttaacagtcgcataggctttttttatgcgcaaaatacggaaaagaggaattgaaatggttaaaaagttaaatgtgcaagaaatgattttaaccttacagcgtttttggtctgaaaaaggctgtatgctaatgcaatcttacgatacagaaaaaggggccggcacaatgagcccatacacgttcttacgggcaattggaccagaaccttggaacgccgcttacgtagaaccttcacggcgcccagcagatggtcggtatggcgaaaaccccaaccgtttattccaacatcaccaattccaagtggtcatgaaaccagccccattaaacatccaagaattttacttggatagtttacgggctctaggcatcgatcctttggaacatgacattcgcttcgtcgaagataactgggagaacccatcaatgggttgtgccggtgttggttgggaagtttggttagacgggatggaagtgactcaatttacctacttccaacaagttggtggtttgcaatgcgatcctgtgacaagtgaaatcacatatggcgttgaacggcttgcttcatacattcaagatgtcgacaacgtgttcgaacttgaatggggcaatggcgtgttatatggcgatatttttaaagaacctgaatatgaacattcaaaatatgcttttgaagacagtaaccaagacatgcttttgaaattcttcgatgaatacgaaacagaagcaaaacgtttaattgacttaggccttgttcatccagcatatgactatgtcttgaaatgtagccacacattcaacctattggatgcccatggtgccgtttccgttacagaacgggccggttacttgtcacggattcgccggatggcgcactcaatcgcgcaagcattcgttgctgaacgtgagaaacgtggcttcccgctcttaaaacatgctcaagaatcaaacacggaggtcgttaacaatgactaaaccattcttattagaaattggcttggaagaaatgccagcccacgttgtgatgcctagcatccaacaactagaaaagcgcgtacgcgactttttagaagaacaacacttaacattcgggaccatcaaaacttacgcaacaccacgccggttagccgtcttgatcgaagacctagcggacaagcaagctgacattcacgaagaagcgaaaggccccgctaagaaaattgcgcttgatgctgaaggtaactggagtaaagcagcgcaaggttttgttcgcggccaaggtttaacgaccgacgacattacttttaaagcactaaaaggcgttgaatacgtctatgttgaaaaatcaatcatcggcaaacctgttgaaacaattttgccagaactaaaagccgtgattatggcgatgaccttcccaacacggatgcactgggccgattacgacttcgaatatatccgtccaattcactggattgttgctctattagacgatgaaattatcgatttcagtattttaaacgttacgacgggtcgcacaacacaagggcaccgtttcttaggtcaagccgtgatattggcaaaagcaactgattacgaagcaacgctggaagcacaattcgtaattgcggatgaagctaaacgccaaaacttaattcaaactcagattgaaacaatggcccaagaaaacgattggcaagtcgatttagacgcaaacttgttagaagaagtgacgaacttagttgaatggccaactgctttttatgggcaattcgatcctaagtatcttgaaattccagaagaagtgttgattacctcaatgaaggataaccaacgttacttctacgcacgcagccaagcgggtgatttattacctgttttcatcggtgttcgcaacgggaacaccgacttcatggaaaatgtcattgctgggaacgaaaaagtcctcacagcgcgtttggaagatgccgatttcttctaccatgaagatcaaaaggtaacgattgaacaaaacgttgcgaagttacaaaacgtgtcattccacgacaagattggtagtctggctgaaaagatgacccgtgttggtttaatcgcgcaattcttaggccaaaaatttggtttatcagaagcagaattagttgatttgcaacgggcaagtgatatttataaatttgacttagtgactggcatggtcggtgaatttgccgaattgcaaggggtcatgggtgaaaaatatgccttattacaaggtgaaacactagccgttgccacagcgattcgcgaacactacatgccaattagtgctgaaggtgcactccctgcaacaaaggtcggcgcggttttagcaatcgctgataagttcgatagtatggctgatttctttgcagtgggcatgattccaagtggttcaaacgatccttatgcattgcgtcgtcaagcttatgggattatccgcatcttagaaaaccaaaactggcacttcccaatggccgattatcaagctgcgatgagtgacattgttaagcaacaagctgatttcaaccttgattggtcaaccaatgctgacgcgatcagcgatttcttaacggatcgtgttcgccaacgctttaacggcatgcggcctaaagtccggcgtgatatcgtagatgccgtcttgaagaatcaaagtcaagatccagtcgtgatgttcgaagctgccaaagtgctttcagaccatcaagatgatgcagatttcaaggcaacggttgaagccgtgacacgtgtgttacgactcgctgaaaaagttgactttgcaacaactgatttaacggttgatcctgcattattcgaaaatgaagctgaaaaagcactttacacagcggtcgaagacttacgtggtacaattgctacgaacccattagctgataattacggcatcttacaaacactacgaccattaatcgaagcttactttgatgccacaatggtcatggctgaagatgaagctgttcgtcgaaatcgcttaacacagttgatgattatcgctcaaatcgcccttaccttaggtgatttaaacgaattgattgttaaataaacaattcaaaaggggataatagcatgttacaaatgaaacgggtttatgaagcagcgacagactcagatgggtaccgaattctagtcgatcggatttggccccgcggcatttcaaaagaacgtgccgctattgagacctgggcgaaagaaattaccccaacgactgacttacgcaagtggtttagtcatgagccagctaagtttcccgtttttaaagaaaagtaccttgctgaaattgcagctaatccagcttggccggcgtttgaaaaggtagtgcacgagcaccttgagctgggcaacgtcacgttagtctatgcggcaaaggacctgcaatataatcacgttgtcatcttaatgggacttttgaaaaaggaccttgacaacgaatgagatagtttgctatatttatttgcaactgtacctaaatggtgctatgatatatagtgtatttttgtgctgataatccttaaaagtcgcatttcattgtgaggtgcggcttttacagtcttagtacaatttgaattgaatagtgaggtgagaccaatggcgggaaagattccgaatgacgtgattgatgatgttcggagccaaactaacatagtggatgttgttggtcagtatgtccagctcaagaagagcggcaataacctatttgggatttgtccgtttcacgatgagaagaccccatcattctccgttagtgaagagaaacagatttttcattgtttctcttgcggacggggtgggaatgtcttcaagttcttgatggaactggaacagattagttttccagaagctgttacaaaaatcgctgactttgtcggcttcagtttagcggagacttatcgacccactcaaaatgttcaagaatcaagtgaagtgacgcagtttaagcaactctatcgtcaggccaatgaactctttacgcatattttaatgagtactgaagcgggccaaccagcgttagattacttacacgaacggggcttgacggatcaattaattgagacgtttagtattggctatttaccggatcaaaccgatttaatgctttcattcttccagaataaagaagttccgtaccagacactacgtcaatccggcttatttattgaaactcagaccggcaagctgcatgatcgtttttccggccgagtgatgtttccgattcggaatgcgcaaggtgaagtgattgctttttctggccgggttttggtgaaacaaccagatcaacccaaatatttgaacagtcctgaaaccgtgatttttaacaagcggaaggttttgttcaactatgatttagcaaagactgctattcaccaagaacgcaaagtttacctgtttgaagggtttatggatgtgattgcagcgtattcagccggtgtttcaaacggtgtcgcttcaatggggacgagtttaacgactgagcagttgggaattttagggcaacaggctcgggaattaattgtctgttatgatggtgatcgtcccggaatcgaagcgatgaaacgcgcaattaccatgttgcagcaaaataccaagcttgaattgagtgtggtggttttgcccagtggcgctgatccggatgaatatgttcgccaatatggtgctgaacaatttaagacaaccttgcaaaatggtgctgaaacaccgattgcatttgaactgcggtatttgaagcaagggttaaatctggataacgagaaggatcaacttgattacgtgcaacaggcattatccgtcgttgcgccaattgattcgccgcttgaaatcgagatttacctcaagcaaattgaagccgatagcggcattacccttgatacgttgaagcggcagttacaaacattgcgcgttaaacgggcaacgcaacaaccactttcaccggcatctagtcagtatgattatgacatgccacctgaaccggatgacgcatttgtgggtggaccaccgccaatcattggtgatccgcgggcaacagcgacgcgtcagccacaacggctaacccgggttgaacacgcggagcaagaagtgttgcatatgttgatggctaatgacgatatgcgcctgcaattggagaacaatgccgattttagttttgtgcataccccgtaccaactgatttacgagttatggcgcgcctttttagctgaaggtaagtcgaccttggccgacttcatgggttatatcccagatgacttacaagccttagtcgttcagattgatgcgcttgacttaccagaagaggcaagtcaagaggcgttaaacgactgtctgttcgtcattgcgcaaaataacgttgaggaacaattaagagaagcgaaaattgccttaaaagaggcgaccaaattggggaatgcgagcgaagaaacgcgcttaaccctggaggtcattagacttgtttcgcaaaagaaattaggaaattgatattaggaggtttctgaatggctgataataaaaaagctgacacgaagaaatttgatactgcggttaaggctttaattaaggaatacaaaccaaagaaagaaatcaccaatgatgaactcgttgcaaaaatcgtgaaaccatttgcgctacaagctgatgaaatcaatgaattaatgcaaaaagtggaagaccaagggattgggattgtcgatgaagatgggaatccaagtgccgctacccttaaaaaggaaaaggtttctgctaaagaattaaaagatatgactgcaccaaccgggattaagattaacgatcctgtgcggatgtacttaaaagaaattgggcgggtatctcttttaaacgcccaacaagaagttgacttagccttgagaatcgaacaaggtgatcaagaagccaagcaacgccttgccgaagctaacttgcgtttggtggtttcaatcgctaaacggtatgttggccgtggcatgcaattcttggatttaattcaagaagggaacatgggcttaatgaaggccgttgaaaaattcgatcaccgtaaagggttcaaattctcaacatatgccacatggtggattcgtcaagcgattacgcgtgcgattgccgatcaagcccggaccattcggattcctgtccacatggttgaaacgattaacaagttaatccggattcaacgacaattacttcaagatttgggccgcgaaccaacgcctgaagaaattggtgctgaaatggatatgaatacggataaggtgcgcgaaatcttgaagatcgctcaagaacctgtttcccttgaaaccccaattggtgaagaggacgattcacacttaggcgattttatcgaagatcaagatgccaccagtcctgaagaacatgcttcttatgaattgttgaaagaacaattagaaagtgtcctagataccttaacagaccgtgaagaaaacgtcttacgtttacgtttcggccttgatgatggtcggacacggacattagaagaagtgggtaaggtgttcggcgttacgcgagaacggattcgtcaaatcgaagccaaagcattacggaaactccgccacccatcacgttcaaaacaattaaaagactttttagaataaaagagtgcgtaagcaggcggctatattttgagggttagcatagtcaggcgaataaccaacgatgttggttgtttgactgacgtagctagccgcagaaatatgcctgctagagcacgttttcgataaagtgcgtttagttacgggagcaactgagcatcaatacaatattgtcattaattcagattttagaattaatggcaatgttagattaagcggaagttgttgaactaaaaagcacgtttaggcaatcaataaaaaggccgcaagctaacctagcttgcggccttttttgcgtgtatctaaacaagcagagcaccaatccccactgctaaaaatacaatccccatcaatgcacatgaccataacgccatgggtatgaagactgaagtactgtggtttgcttcaaccttcaaagtcttgaatgttttaatggtcattgaaagttggaaaataccgatgattagcattaaaatcccaataattggtaaccagttcatgttaccatccccttcactgtaaataatttatcttatgttaactaggatttccgaaaactaataaagctcaaaaagaaggggctaattgacgtttataaccaattcaataaactagcaagactaatcccaataaagacaagccccatgaaagcactcgaacagagcgctgctggcgcaaagacagaagtattttgatctgcgtgtaattttaagtcttgataatactgatacgacttataaatttgaaaaatgcctaaaccaatcatgaaaacacagaatagttgcaaccaactcatgagaccactccttaatgtatagaaagcgttttcgatttaatttcagtataaaactaaattttgcctaaagcaacttctgctatccagaatcaagtgttcactttgactgcgtatgccgtctaaaatttggtatactaactataacaatcaaagtttctagaatggagttttatttttgtcaccaattcatttatcaaagcgtttagctgcggttgcgcagtttgtcccacaagatagcattgttgctgatatcggttcagatcatgcatatttaccaatttggcttacggaacaaaaccggttgaagggcgccattgccggtgaagtagttgccggtccgtttgaatcaacacagactcacgttaatcaatggcacttacaacaacagattcaagtccgcttaggcgatggcgtagaggtattgaatcctgaagaagaccatgtgagttgcatcgtgattgccggcatgggtggtttattgatcacggaaattttaacccgtggattggatcatctgaacggccatgaacgactcgtgttacaacccaatatcatggaaagtactgtccgtgaatggttgaatgcacatgactatgcaatcgttgatgaagcgattgtcgctgaagacgggcatatctacgaagtgattgtcggcgaaccccaaccatcagttgcaccattaagcgaaagtgatcgagtgtttggccctgttctccgccaaacacaacctgctgatttccaattgaagtgggggacaatgttgaaaaaacggcgtcatttattgcaacaattacaaaacgcacaagtcgtacctactgataaagtcaaagcagttgaacatgaaattgcattaatcgaggagatgaagacatgggaaaattagtcgcgagtgacttaattgctgcgattgaagactacgcaccattggcattaaaagaaggcaatgaccccaccggttttcaaatcgggcgacgcgataaaagcattgaacgggtgttagtaacccttgatgtccgcccagaaaccgttcaagaagcgattgaacagaatgttgattttatttttgcccaccatccagtaatgtttcgcccagcgcggaatctcgatctaagtgatccgcaaaacaagatgtatgcggatctgttaacgcatgacatcacggtatatgccgcccatacgaatttggataagactaacggcggcatgaatgattggctagctgaagctttacaactaaacgatgtgcaaccgtttaacatcacggactaccaatcattagtaaaattggtggtctttgtccctgagtcacatgctgaacagatgcggatggcattgaatcaagctgacgcgggacatattggcgattatcaagcctgcagttttagtacgaccggaatagggcgttttcaaccaacggacgcagcaaatccttatatcggccaatcaggtgatctagaagcggttaccgaagttaaaatcgaagttgttctgccagtggccatgcaaaccaaagttgttcaggcgatgcttgcggcgcatccttatgaagaacccgtttatgatgtgattccattagctaatcaacaacaaccgattggtattgggcgcattggtcaagtcgctcaatcaatgacggtccgggattatgcgcaatttgtctgcgaaacatttgatttaacaggtctgcgcttaatttcaaatgaaccggacaaaatagttcagacagtcgccgttgtcggtggcgatgggggtaaattcttcccagccgctttacaagctggtgcggatgtctacattaccggtgatgtgtattatcatactggtcacgatatgttggcagctggtttgtcagtaattgatcctggtcatcatgtcgaaagtattgtgaaggataagatgacaggaatttttgaaaagtgggccaaacagcgtggttggtcggttacattcattaaatcacagcaaaaaactgatccgtttacatttatttttaatgcgaagtaggttagaatagaattagtattaaataatatctaggaggctacaccatggctaaatatgaaaaattgattcctcgttttctagaatatatcacaactgaaacacgttcagatgaaaacgcaacaacgagcccatcaacccaaacacaagtggtatttttacacaaattgatggacgacttgaaggaaatcggattaagtgatgtgaaatacaacgaaagtaatggctatgtaacagcgctattaccaagtaatattgataaaaaagtgccaacaatgggctttttatcacacgttgatactgccgacttcaatgccaaaggtgtcaatccacaaatcgtcgaaaactatgatggcgaatcaattattaaattagatgatgcgggtaaattcgtattagatcctaaagaattcccaaatatgaaaaattataaaggccaaactttaatcacaactgacggctcaacattattaggttcagatgataagtctggggttgctgaaatcatgacagccatggacttcttagtccaacatcctgaaatcaaacatggcgacatcaagattggttttggccctgatgaagaaatcggaactggcgctgatcactttgatgccaaagatttcgcaaccgactttgcttacacaatggatggcggtccaatcggtcaacttgaatacgaaacattcaacgctgctgccatgaaagtcgatattcaaggtaaaaacgtgcatcctagtgaagctaaaaacatcatgatcaatgcccttcaagtggctgttgatttccaaaatgctttaccaagcgatgaagtccctgaaaaaacagacggtcgtcaaggtttctatcacttattaagccttgaaggcacagttgatgaagcacacatggcttacatcattcgtgatttcgaacgtgatggtttggaagaacgcaaagcatttgctgctaaagttgctgatcaaatgaatgctaaatacggtgaaggccgcgttgttgcaacaatcaaagatcaatactacaacatggcagaagtcttaaaagatcacatggacgttgttgatcttgctaaagatgcaatggaagccgttgatatcaaaccattaatcgaacctgttcgtggtgggacagatggttctaagatttcattcatgggtattccaacccctaacatctttgctggtgctgaaaacatgcacggtcgctacgaatttgtttcaatcgaaacaatggaaaaggccgttgatacaatgcttaagatgaatgatttaaacgttgaacggaactaatcaacaatctaaaaagccccgcacaaattgaatttgtgcggggctttttttgtgcggttaattttgatgcattgtcaacaagcctttgagttgttcaatgggtaattggcctggtgcactggggtgttcaaggtaaccgaaactcacagctgaaccgaattgaccaccaaaaatgcgagaggctaagccaaattcagacatcgccatcgtgatcagtggggttgtgtgatcatgtgtaaaagactgggtaatcgccattaaccgagtagtatcctcattactttgagcggtagttgctagttttaacatatctgggtgcgtcgcatgcattgctgcgagttgtttttgaagtgttagattatcaggggttgtctttaaatcgtgatggcttagtaacacttgatagccattcgcacgtgcaagcgcgctgacggcttttctaactgcctcaggtaaagaccactcaatatcaaccacatcgccgatttgagccgataatagagctgtatagcggtctaaatagtcggttggatcagacaggccgccatcatgggttgttctgagcgttaaaataacggggtgcttgcaggcggcaatttggtgaccagccgttaataaggtcgctggtgtttgccaatagtctaagcgccattctagaatatcaatcgcagcttgcttttgctcaacgagtgccatttcacgcacacaatcgtctaggttacgcggcattaaggaaacggccgtttgtgtctggccagtgccaacatggagggtcatcaaatgacctcactttctaatcaaaatggataaacaatttttaaatcgataaggtctattttaagagaaaaagttgtttaacgcaataaacttaaccaattaaataacaaaaaagaaccaccaactggtagctcttttatagggattgattaatatgagcgacacgatattgaccatcaattaatttaaacgttcaaatttcgctgaaacgttcaatataagccgcttcacgacgttggtcattaaccgtggctgtctgccgctcatcagtgaagtaatcgcgcatttgcgctgtcactagaatatcttggcggttcggtttttcaggtaataataactcagttgaaacaatggcgatactctcaagttggttatgtttatggtgccgttgataacggtttaagatgcgttgttgttggtgctgaaaatggggcgtcattaagtccgccacgttgcttaagtcatttgagggccaagctgtttcaatttgatagaatgcattttcaaagcgcgccgcggtttcagcatctaacggcatggtatcagccagtgcccgttttctacgtccggttaaccagtcacgcactttacgccaaatcatgatcccaagggagacgaatacgaaaggcagggtgactatactatcgaataaacgacgcattggggacttgtagtaatgccgacatcccgcatcatcgtaataataatcacgactacggccgccaacataactggatgtcggtgaagacccaccaccgctaccacccgaaccaccagagccacccgaagatccgccagcacgcgcagcaactggacttggtaataatataattacatttcgtctctcaactggcgagaatgcgacataatctttttcgtgagtttgcttcattatttgtaaataattctggtaatttaacaaatagcctcttccatgctccgattctactaaagtcattttataagtctcatttatcgatttaaccgacctgtaaatcgttttttgagatacggcaactacatcggccaattcatttgctgtcatgtaatctccattctttaacaaagcattcaatatctgattcatataaccagtcatattttcctccttatgtttatgatagcgctatttttattaaaaaaagataaacctttgcccgttgctacggtcattcttcttgtttttctttattctagtacatcttgtgtaatgtatacaaaaagccctaccgtattccggtagggcttttcgttgtgtggagttgctattaatattattttttggtacatccttagtgtagcaaaacctgggcagcattccagttacaagttcagcgaattgtccggaaagtgaacaatatcactaaattgtttagtcacttttaacgattttctcaagctgcttcaaattaaaacataaccgctcatcaatcacctccggttcggtctgcagattattttcaaaccaacaatctaattggcgaatgattgcaccgccgtaaaagtcttccaagtgatttaactgttgtggcgtgtattgtgctttgtaatggcgcaatgccttatgaataatctgtttcataacctgttcaaaaaagcggcggcgttccggataatccgctagatgatataaattcaagcaaaacatgcgataccgtgtaataaattgaatggcttcatgacagccggattcccaatcgccactcactatactctcatcaactttttgaataatttgttgttcaagtgtccaccaaaataagccgcacatgcccgttggaaaatgattataaaaggtcgttcgtgacaaattagccgtcttcaaaaaagtcgcgaccgtcaatttcgtcgctttttgatccattaataattcgattaaaatcattgccatatagcgcttagtcgcttgtcgtcgtgtcatttacccacccgttctaattactattgttattttaccaataaacaatcattaacggtaatattattaacaaagattaattttatagcaatgaaaacgttatctaattattatcgattgcacaaaaaaagcggtgcgaatttgatattcgcaccgccttaacacattaattatttttctaaaccttccgcaactgcttctgggtagttggctgtgacagttgcagcacaacgcgcacaaagcattgggaacttatcatctgaaccgatatcagtcttaatcatccgacaacgatcacaaacatccccctcagcatgcgcaacactaaccgaaatgccatcaaattgagtagcttctgttggaacatcggctgattgatccgcaattgttaattgtgagacaatcaataattgtttaacatcagcatccaatgaagctaataaagcagcattggcttcgtttggataaagtgttacggccgcttctaatgacttaccgatgaccttgtccatccgggctgtttcaagagcttttaagacatcgtcacggatccccatgaaggcattccaagtttcaactaagtcttcttcaccggcaaaatgttcaacttctggcatttcagctaattgaacgaattcttctggttcgtgtaagtagctccagatttcttcagctgtgtgtggcaagattggtgtcaataacttcgtcaaggctactgctactgcatagaaaacagtttgtatgttacgacgaggtgcatcattttgaccatcgatataaacaacgtctttggcgaagtctaagtagaaggctgataattcgttcgtcaagaacatgttaattgtcttataaactgtggcaaagtcgtaagcatcatacgccgctttacagctggcgatgattgcgtttaagcgcaccaacatgaacttatcaactgaacctaattctgcgtaatcaactgtatctttagcaggatcgaaatcagttgtgttcgcaatcatgaaccgcattgtgttccggatcttccggtaagcttcactgacttgttggaagttttccattgtgactttcacgtctgagctagcatcaactgaagcgacccagaggcgcacaatatccgcccccatttgtttgatgatcttttcaggcaagattgtgttcccaagtgatttactcatcttacgaccgttaccatctaagacaaagccttgtgaaataacagctttataagggctgacttcgccaactgcaacactggtaattaaacttgagttaaaccagccacgatattgatctgaaccttctaagattaagtccgctggataagttaagtcatcgcgagccgctaacacagcttgatgtgatgaacctgaatcaaaccagacatccatgatatctttttcttttgtaaattcaccatttggactcccaggatgtgtaaagcctgctggtaataagtctttagcatcccattcaaaccaaacgtttgaaccatgctctgcaaagagttgcgccacacgttcgattgtttctggcatgacgatttctgtgccgtcttcagcatagaagattggtaatggcacaccccatgcccgttgacgagagataacccaatcgccacgatcacgaatcatgttgtaaagacgggtctttccccattctggcatgaattcaactttttcgatttgtgctaagatttgatcgcggaacgcatcgattgaagcaaaccattgggctgttgcccggaagataacgggtttctttgtccgccagtcatgtgggtaactatgcgtgaagaagtcgagtttcaataatgaaccgttcttttcaagcgcttctgtcaccattgggttggctttatcgtaataaacgccttcaaaaccaggggcatcttcagtcataatccctttgctgtcaacgactgaaaggactggtaacttatatttagtgccagcgttataatcatcttcaccgtgacctggtgccgtatgcactaaaccagtcccagtttctaatgtcacgtggttgcctaagatcaccaatgattcacggtcatataatgggtggcgggctgtcattaattccatgtcagcacccttgaaagtcttcaagatttcaactgattcccaaccaagaagatcagtcatcttgttcaaacgttctgctgccacaacgtatttttggccgtcagctaacacttgaacgtaatcgaaagctgggttaaccgcaatccctaagttagcaggaattgtccatggggttgttgtccagatgatgaattttgtatccgcatctaataagtctttcccatccaccacgttaaacgccacgtacattgatggtgacttgatgtctttgtattcaatttcagcttccgctaaagttgattctgatgaaggtgaccagtaaacgggcttcttacctttatagatataaccttttttagccatttcaccgaagacccgaatttcttcagcttcaaaatcagctgttaaagtgatgtatgggttatcccaatcagcagaaatcccaagacgcttgaaatcttcgcgttgcttgttgacttgttccatggcatagtcgtaacaaagtttacgataatcaacgaggctcatttctttccgcttgataccctttttagccaaggcttgttcgattggcaaaccatgtgtatcccatccaggaacaaaaggtgcgcggaacccgttcattgatttgtaacgaacgataatatctttacttgttttatttaaggcgtgacccatgtggatgttgccgttcgcaaatggcgggccatcatgaagaacgaatgaaggtttaccttcatttaatttttgccgttgttgatagaggttgttatcggcccaacctttttgccaatcgatttcacgattcggtaaacctgctcgcattgggaaagctgtcttgcccaggtttaatgtttctttgatacgcatcaaatcactcctttatttttaaaaacaaaaaaagatcccgccctgaataggacgaaatcttcgtggtaccacctaaatttgaaggtcaatgaccttcctcaacatgcaataacgcgcattaagcgtcccaaattactcaattcatctggaatgaaataaggtgatacaccgctaaacagagcattaccaaccttccaccgtcgttggctcgcttaaatgatgttttgcttgctagtccttatttaaatctgttgcttggttttcaattgggttgtaagaatccgtaacagcttcaaccacttcatctgaatcggtgtcttcgactacatcggagagcacttcatcattgtcatcttcttcgactggtgtttcttcaccagggaaaataatggtttgcgttgttgtcacatcatcttcagcaatttgaccccaaggtttaacttctgcatccgagtttacttgatttgacccatggttgtcaaggtctgtcatatcaatttcagctgaaagagcttgatggtccgctaaatcatctttagctaataaatctgtccattcaggactcttaaccacttctaattgtgattcaagcataacttgtaatctttgacggaaaatccgtgtttgtttcttcaagtcatcggtttcgattgcaatttgttttgcacgttcagttgcatcgtcaatgatgtggtttgatttttcagttgcatcatccaacattgattttgcattcttttctgattcagtttgaatcatttcagcttcttttttagcgttatctttaacacggtcagccgcttcttgtgcaacaatgattgattggttcaacgcatctttcaattcattaaaatacgttactttttcatcgcttgattttaattccgcttttaaactttcattttctgttaaaactgattcgtagtctttaatcacttgatctaagaaatcattgacttgatccggattgtaaccccgcatttttgtgttaaattctttgttatgaatatctaaaggtgttaaaaccattttgaaattcctccatctttttcagcaattattttcttaaaatccccagtgtcactcgatatttttctttacgagtctgaccatcaatcgattggagttgaatccggccaaaaccacgaacagagacgatatctaatagtgctaattcaaaatctggtttatcaaatgcttgccaattcagtttaactttgttggcttgaattaattctttagcgcgttgtcgcgacagattgtaaacagttgaaatgatcgtatccaagcgaaacgagctgacagtcgtttgttcgaattgccaagcgtccttaggcgtcaacaactgtgtatagtcttgttcttgcaaatgaactgatacgcgaccaatcttagtgatttgctcttcgacatagcctgccatcttcttcgtcacaaagaattgccagcgttcttcatcggtcataatatccccaaaaacatcacggtcaatgccagcattcacaagcgtgccaagcaccttcccatgtgataggtttgcaaatttaatcgggtaccgaatctcaaataattgaatctcaaaatccgcatccgttggttcaaagtaatctggagcaatcattgcccgtttccgttcagcagcgttatatccgccattaaagtgataacggacgtcccctttttcaccgaccaaggtttgtaaaataaacgcttgacgcggatctaaaaacgccgttaagattggtcgatattcaacttgtgcttgctcaatccaatccaaaacctgcgcaacaaatggcgcctcgctttttctaaaatgttgatagacatctgcttgattgaccattgattacatccccactaataattgtgcgagtaagccgatcccacgttctactaaatataaaacgaaaaacgcagcaatggctgaaatcccaataccaccgattgcaggaatgaagcggtcaaagatttctaagaaaggttcaactaacttagcaacaaagcgccctaatttactgcccatcgcctctggaatccacgttaataaacaatagattacgacgatgccactataaatccgtaccacatacatgagcatcaagagcacataaaataaaaatagttgcacctagttcacctcaatatcaaaatcattttgatcgacaatatctgaaagattaccatcgatttcatagttcggtggcgtacataagaaaatctgatcaccaacccgttgaatttcaccgttgatggcaaaaactgcccctgttaggaaatcaacaattcgagtggcttgtgtcgcttcaattcgtgtgaagttaacaatcactgctttattttcaagtaaacttttgccgactttttttgcgtcggaataaatccgtggttcacataagacaattttattcattttagtagctcccgcagcttgcatcgagacgacgttattcgggcgaacacttggttcaccttcattagtgacagccgcagtttcttgcgtattagcatattcatcttcatctgacatgccgaaaaaattgctaagactaaacttaccagccatgagtcatcctccttagttattgcgacggcgcttgaaaaatggcggcacatcgtccccattttggttatcttgcttattatcatccgcttgggctgtccgtttgaagatatcgaaatctttcttttcaatttcatcaaatttttcagttgcttgcgcttgctcgcgggcacttggttcgcgacgcatatcccaatctacaaatggatcattattttgttctgatggtgttgaaggcgctgttgtctttggtgctgaattgtttgttgctggacgacgtttgttgttatcttcatcaatcccagttgcaataaccgttacaacaacttcatcaccaagattttcgttgattgaagtcccgaaaatcaagttaacatcgttagttgcagcttgttgcacgataccagcagcatcttgcgcttcaaacaatgacaagtctggtccacccgtgatgtttaagaggacttgttctgcaccatcgattgaaacttccaataatggtgatgaaatagccttcttcgttgcttcagctgtccggttttcacccgttgctgaaccaattcccatcaaggcagagccttggttagccataactgttttaacatcagcaaaatccaagttgacaaaccctggtgatgtaattaagtcagaaatcccttgaaccccttgacgtaaaacattatcggcttctttgaaggcttccatcattggtgtcttcttgtcaacaatttcgagtaaccggttattagcaatgatgaccattgtatcaacatgttgctttaattcagcaatccctgaagcggcgtttttaccacgtttagggccttcaaatgtaaatggacgagtaacaacccccaccgttagtgcgccaagatctttagcaattttggcaacaacaggggcagcgccagttccggtaccgccacccatgccggctgtgacaaagatcatgtcagcgccttttaaggcttcgttgaggacttcttcactctcttcagcagctttttggccgatttcagcagttgcgccggcaccgaggccgcgagtcaacttaggtcctaattggatctttgtttcagcttttgaatcttcaagtgcttgaacgtcagtgttagccgcaataaaatgaacacctttaacgccttcgttgatcattctgttgacagcgttaccaccagcaccaccgacgccgattactttgatgattgcgccgctattttcttgtgctgcatctaatgaatattccatctgtttttcctcctgttacgactagcccttattcaaaaaagttactaaagaaatttttcaggccttcgaatgcattttttgattgatttttaggtttggttttcttacttggtacttctttggttgttgcttgaggtttcattgttgatttcgtcactgtttggtctaattcagtctgtgctacattcccaagtgcgccttggaccaaccaatcaacttccgacaagttagctatgtagttaattaaactcaacccttgggcaaatgatgggtgccgcaagcccatttgatctggaatgtataacttcactgggcaattaaagatttccttagccaagtcgacaatcccaggtaaagctgtcacgccaccggtcataatcaccccaccaggcatatcaaaagcgtgtactttatccaattcagctttcaaacgatcaaaaatctgcatcgtccgtgcttcaataatctcagctaattttttctctgtcacttgcactggtaaagcttgaccaacaacttcaattggaatttgttcttcttctgaagcagccaatgaatcagcattgccataatctcgtttagctttttcagcattttcaattgacgtgttcaagaccacggaaatatccttggtcatatggtcgccaccttcttgatcaatcgccgtaaattttaattgatgatcatgaatcacagcagctgtactttgaccaccgccaaggtcgacaacgattgccccaaaatcttgttccccgtctgataaggctagcttaccaagtgctaatgggttcactacgagttgtgatagtgttaaacccgctttttcaatacatttctttaaattatgaatcattgtcttgggtgcggtgaacaaaattccgttcatctcaagccgaacccccatcattccgcgtggatctttaatcccatcaaacccatcaaccgtaaacgattgcggtaagatattgaggatttcacgttcaggtggtaaattccgaaccaatgcggcactagcaacgtcttgcacatcttgaccagtaatttccttagattgatcagagaccgcaatcatcccttggcattcttcgatttgtagttggttggctggaattccagcaacaacccgattaatttcaatatttgctttttgttctgcttgttgtacggcttgttggatagcggtaaccgcttgatcaatgtccacaatcgtcccgcgacttaatccgtttgatctagctgatccgacgccaatcacgttaagttgtttattaattgattctgcaacaattaccttaattgaagtagttccgacatcaagaccgacatatatttttgaattctccattaagtgtgtggaacctccttgcattcaattagaataaaatgattcctatgctaaatagtaccacatttcgactagatttagaaagccaatccaatctttttaaacagtgttaactaattttttgttgaatcggcctcagaattatcaaataatttggcgtaagcgccaacttctaagtcaattcgtcccttaccgtccatttgtttcgccagtgtgggataatatttaattttcttggcaagtgtccgcaaatccccaacaacctcattaccatcattcatatataagtgaacttgataaggattattgttcttagctgttaaacgaatttccgacacagcactttgaatgctgtttggaaaggcttgatatagttttaacccttgctttaagaaggcgtcatttttaaattgactatagacagggctattgccgagagactgcgtcattttcgtctttaaaatcgtgccattttctaagattggataatattgtttatgccgcactagatagcccaccgtaggatattccgtaatcgccaatgtcagttgattaaactgatcaactttgacatttacacttttcaccttaggtagtttctggtgaatccgcttctcaatcgctttttcctgccagatttgtgtcaggacattatcgccaatccgtacgccactcgcattaatcacctgttgatcaggcactgatttagtcccgttgaccgtcatttgttgaacgtcgctaatgggcaacataaaatagattgccacacaagcgcccaatgtgaaggtgctcaataacgctgtcaaccgccactttgtctttgccgttcgttgcgcttttagatgtggtagttgaccactaatcgttggtctccccggcgttaaccgttgccgacgttgtttcttccaacgctttagttgataagcgcgccaaacgtttagtaattggagcggatcgagcgacccatttttagttgtttttttcttcaagtcatccgcccccttcttaacttagatgatagtattaatcacttcaataatgcgatctgaagcgtctggaatccccattttcttagctgctttagccattgcttgttgactatcaggggttgcaaaaagcgtatctaatgattggactaatttgtcacccgttaattgtgcttctggaattaaaatcgctgcgtcttctttaaccaaactctcggcattttttgtttgatgatcatttgttacataggggcttggaatcaaaattgacggaatcccaagtgctgtgatttccgccaaactcgtcgcaccagcacgaccaacaatggcctttaaatctggtaaaatttcgggcatgtcgttgatatatggtacaacagccaaattatcattgagcgtcatcgcctttaattgcgcttgaacgtcatcaaaatgaacccgtccagaaacgaatagcacctgatactcttttgtattaagtgctggtactgcatcgataaaagcttggttaatacttggtgcaccacggctcccaccaaacacaagcactgtcggactgtcagtcttaagcccgaattcacttaaacgttcgtttggtaacattccagcaacttgttgggcccgcggattgcctgttaatacaattttgtgcattgggaattggtcgctgactgattcaaaggaaatggcaactttatcgacaaagcgcgccaaaaagcggttggtaaccccggctgctgagttttgttcatgaatcaacgttggcacttttaagcgacttgctgcatacagcaatgccccagaaacatagccacccgttccaatcacaatatcaggtttgaatgttttaatcatttcttttgcctctttaacactgcgcaagaaaagttgaattgttttaatatttgttttaatgcccttcatattcatcgaacgtttaaatccttggatttctaacgtcttaaaatcgatgccttgatctggcacaattttactttccaaaccgcgtttagtcccaacatataaaacggcatccaacaagtcgcgttgttgcattctttcaattagggctaacgctggatagatgtggccaccagttccgccaccagatatcattactctcattttagaatctccaatttaatctgtaatttgttcgactgccttaataaagacgtccccacgttcttcaaacgtcttgaactgatcccagctcgcacatgcaggcgacaataaaaccacgtcgccggcttcactagcagcataagcttcaggcactgcttctgttaaattatcaactattttgatgacgggaatacctgcttcgcgtgctgtctgtgccaataattgtttggtttcaccatataagatgattgcttttacgtgttcttttagtagtggtaataatggttcgaaagtaaagccccggtcaagaccacccgctaataaaacaattggttgtttaaaactcttcaacgcgacttcggtagcttccatattggttgctttagagtcgttatagaagcggcgaccttcatagctcgtcacaaactgcatccggtgtttaacgccggtaaaggtcgttaaaacatcaatgatcgcatcgtttgattggcccatcagcttagccgccgcaattgcggccaaagcattttcaatattgtggtcaccaggaacgttaatatcagtcactggcattatcacttcacccttaaaacaaagttggccatctttgacataggcgccagcttcagagttgcctagccgtgaaaatggcacaacttgcgccttagtttggcgactcaattcacgtagttcaggtaagtcccagttgacaacaaaaaagtcgtcagccgtttggttttgaacaagtcgcattttcgcagccacgtaattcgcacgcgagccatgataatccaaatgtgcttcataaatattcgttaaaactgcaatcttaggtttaacggttgttgtaccgagtagttggaaacttgataattctgtgaccatcacatcggcagccgtcactttttgggcgaccgcacttagtggaatgccgatattgcccgcagcgtatgcgtgcccctgggtgcgattttcatctaacatcaacgtaattaacgttgtggtagtcgtcttcccgtttgaaccagtcacactgacccattgggcttcagacacttcgtacgcaagttctggttccgttaaaactggaatcttacgcgcaatcgcttctgccaccattgggttatcgtaacgaatgcccggatttttgaagaggtatgcaaagttgcgctcaaataacgccaatggatgcgatccagtaatgacggttgcccctaattcacgcaattgtgcaacttgaggattgtcttcttgttcctttccgtcattgacggtcacaatcgcccctaattttaataacaatttagcagcattaaagccgctcttccctaatcccaaaactaaaactgcctgatcttgatacgtcgtgctggccttcattaaattcgccctcttctaaaaaattaacagataaattgctgaacagatgatactaaataaccaaaagctgatatcaatccgccattcactccaccctgacatttcgaagtgatgatgaatgggactcattttaaaaatccgcttatggaataacttaaatgaaccgacttgtaacatcacacttgctgtttcaatgacgtatactaacccgaccaatagcagtgagaactctcgatgtaataaaattgacatggctgctagtgcgccaccaagtgctagtgaaccaacatcacccatgaaaatttgcgctggttttttattgtagattaaaaagccaagcaatccgccaataatgctgaggccgaaaatggcgacatcaatttggttttgatgaaaggcgataattgtataagttgcaaatgagatggttgccaagccagcaactaacccatcaatgccatccgttaagttcaccgcatttgagaaaccgactaaccacactaagacgaatatacaaaagaaccagttacttgaaatagtgccaattactgggatttcaagtgcagtactgaagccttcatggaaataaacagcgatgaagacaatcccaccaataatttgccctaacaatttttgccaagcgcgtaagcctaagttctgtttacggaaaactttaataaaatcatctgaaaaaccgagaataccgtataacaccagaataaacatggcaattaatagactattcgttaactgttttaagaataatcctacccaaatacttgaaacaacagcggcaataatgaataagagcccgcccattgttggtgtcccatttttcttagcgtgccatttggggccttcttcacggattgtctgcccctcttttttaaagcgtaaatacccgataaaaagcggcataaaaatcaccgtaattacaaacccactcattaagggcactaaaaattgtcctgctgccatttcataaactcctttaatccaactatcttattttaattgtacttttatttttttaaccccatctagcaacccattgaccgctaggctttgatgataagcatatccgctacctttgatgtcaatctcaacacctgttaattgcgcgagcttcaagaggtcatttttcgaccaacccgtgacatctggcatcgtcattgccccattggtcattaaaatgactcgctgtttaggtaaaatcacactattggcctttggtaattgctggacgactaagttcccactaccaacagaagcggtttgtaggcctaaatccgttaatttcttttgtgcttcatccgttgattgaccaatcacagacggaactgttacttgttgttgtgtgtctttttcagcctttttggtatactccagtgcccgtttcatcattggattgaagacctgtgccaaaatactttcagcactatctgtcatattctgcggctgtttcattgtgacatataaaatatacttaggatcatcagctggtgcaatccctgatacagagaagatataattgcttgcgccggttaaatagccaccgtctagaccagtaatttgtgcggtcccggttttaacggctactttataatctggaatttggtaaacctgacccgtcccataatcttgataaacaacatcttccatattttgtaagacagatttggccgtgctagccttaattggtttaccagctttgattggttttacttgatgatcctgattaatcccagataaaatctgcggtctaatcattgtgccatcgttcgcaatcgcacttgtcatctgcagcatctgcattacattaacgttaatcccttgaccaaacgaagttgtggcctgatctagtggccgaacatattgcaatgtcccctctgtttcgccgggtaattgaataccagttggttttaagaagccaaacttctgaatgtagtctttccaaaccttaggacccatggcttgttcaagcttgaccatcccaacgttacttgatcgtgcaaaggcttgactcagcggaatcatcccccagccactcgtttgccaatcgctaattttcttatcgccaactccaatcgaaccggattgataatactgattaggattgtaattaccagagtcgatggcagctgccaaggttgcaattttcaaaacagagcctggttcatagccatcttcaactaatgtatctcgccaaatcttgccaattccctttttagtgctggcattaaaggttggtcgttgtgaagccgccaaaatttcacccgttttagcattcatcaagacggcattcatactcttaggcttatattttttattgacgctcgttaataaagtttccatgtatgattgtaaccgagaatctaaggtcaagtaaatatcttggccgtttttagcggcttttactttgtttttcttttgattgatcgtgtatccataggaatcacgggcaaaattcttgtaaccatcttggcctgctaattgtttgttgaagtatttttcaatccccattacaccaacgaggctttgatcagcgccgtcttcgtcctttggtgattgagcgataccaatgacgtgagatgcgaatgttccattagggtacagccgcgtaggggactcattgaagtaaataccggttaaatgttctttttcaatcttccgtttgatgctcagtgaaaggttttggccggcacttccgaattcaacttgataaactgaacggttagctggcgttaattgtttatagattttttcttcactcaatggtagatagcgactcaaaactttcgctgtttttttcttatcagttacatataacggcttcttattagggccaacgtaatcgtgacttaataccgcatacactgaataggcgttaatgtcttgtgccaaaacgttccctaaagaatcataaattgtaccgcgttgtgcgcgaatcacggaatcagctttgtattttttctgtgatcgtttcgttaaatccacccctgcaatatgcccagtagcagcaatgtaagcaaaacgaccggcgaaaactagaaaaatcgccgcgataattagcaataaaagcctgccaaaaacgcgtcgattccgccgtggactcttacgtgtcttaactgatttcatttagacacgttccgaatattattttcatttagtttaagatcatgtttctgggcaaaagcattcagacggtcagagcttgttaattcaccgatctcctgttttaaatcattattgttagcgctgacttgggccatcttttgagtcgtactttctaatcctcgttgtgcattaacaactgcaattttggtggttaacaaactaaccaacatcgcgaaaaagataattccaataactgacgtcgctaatttttcaacagctgaaaaagccacttttttagactggcttgcaactgcttgtttatgtacagtaggctgcgtttttagcggtgctactggcgtttctaattggcgtgccgtgttagttgccatcatcatcaatccttctagtcaatttctttttgtttttctgcgacacgtagcttagcgctatgtgcacgatggttttcttctaattcatcatctgttggtagaatcggcttgcggttcactaattttagaaccgttttttgttcttctggtaaaattggtaaccctttcggtaaatctgggagcgttgcttgttccttaaacatcgtcttcaccaaacgatcttctaacgattggaacgtaatgacactgatccgcccgccgacattgaccaatggaatagcttgttcgagtgaatcttcaattgcccctaattcatcattgaccgcaatccgaatcgcttggaaaatccgcttcgctggatgtccaccctttcgtcttgccggtgcaggaattgcttctttaatcaaatcagctaattcgattgtcgtttcaatcggcgcaactgctctttgttgttcaatcttccgcgcaacttgttttgagaacttttcttcgccgtagcggaaaaagatcttaattagttgttgataggtccactcattaacgacattgtaggcactgagttcagccccttggtccattcgcatatcaagtggggcttctttcttataactaaacccgcgttgggcatcatcaaattgtggtgatgatacgcctaaatcgtataaaataccatcaatcttagtcacaccgtgttctgctaacgctgcttttaaatagcggaagttactcttaataaaagtcacttggcccgcttcagcatatttggctaatcgttgtttactacttgctaaggcatgatcgtcttggtcaaacgaataaagatgaccggtcgtcagctgagataacaaatattcactatggccgccgccccctaatgttgcgtctacataaacgccatcgggttgcacattcaaggcatcaaccgtttctttcaataaaacactttgatgtttaaatgtttctgtcatctatttaccatccttctaaaaatcaaaatctaacatattttctgcaatatcatcaaaattctcttcagcttcttcgctaaagctcgcccatttttcctggctccaaatttcaatgcggtttgagaccccgattaacacacattctttttcaagaccagcatgtttagcaagtgtgtctgagatattcacccggccttgcttatcaggggaacattcgaccgccgctgagtagaaaaagcggacgaacgcgcgggcatcttttttagcgagaggcagtttttttaacttctcttccaactgttcccattcactaagggggtaaccaaaaatacaattgtccatgccacgggtgagtacaaattccgcacctaatgatttacgaaatttagccggcatgattaaccgacctttcgtatcaatcgtgtgatgaaattcgcccatgaacataaccattcacccctttgcccaccttaactgattttagtctaccacaatcccccactttctaccacattttgccaaaaaaaaccaaaatcttatcattttggaaccaattgtgcacgatatttatatcactagcctttttggccaaaaaaaaacagccatttcgttaaccgaaatggccgttttacttgttaattaagtaagcttattttgggctgtcgcaccacgtctaagcaacgccgcaaaaaattgctcactttaatctaatttttagaagtttaaaatgccagttgcagcgagtgaaccaaaaatgactgagcccactgtggcgattaacattacccaaacgaaaattttagtaatgcgactaaacgtgcttgtttgtttcttcaattattccaccacctagacttttttcttatcagcagtttacaccgaatcacttgaaagtgcaactcagtcctttttatcttttccaaaagacggtacaatgggactattaactttcgaggtgatttaaatgccatttagcacaacacttttctttgcaggcttaccgcccgtctgtgtcgcactcggctactgtatcgaccggttgactcagcgtctatttaaacatcgttttcattatattaattggctaccaattccattgctagtaagtgctatctttctgagtatgcctattttcagtaaagctggctggttcttttgcttagcaatctgtctgtggggaatcatctggagcttaacgcgcttttactacgaccgtgcgctatacctacgtaagtttctacggagttggtggcgctttgtcctcgtgatggccacagcatggtacctatcctttctaatcatcacactcctttaaaccaaaaaaacggtgtcgactctttcaatttgtcgacaccgctttttttagtttaaaaaatatttccctaacgcgcttaattgcgtaattgtgattgtcggttgcaccgtgattggtaatcgatcaacatcgaaataggccgtcgccacatgggcgttaatccctgcttcaatatctaatgcacgatcaccaatcatcacggttttagttttatccagctgataacgatcacataaatcgttcaaactatctggcgccggtttcctggcaaatccgctctgactcgtaacaatttcagtaaaataatccgctagtccatgcgctgccaaaaatttttctgcagcatcatcccgatgggtcaataagaaattctgaccatgcgcactaatctgtttcaaaatcgccgctgcccccggataaggttgcggcgtctgttgtaattggtgttctaattcatgatattctcgatccaattgttcaaatgaaacattagtttgctgagcaagcatctgcagttcccgtttaattgaagtctgcttaatcgcttggtataagcgcgattgatcgactgcgacttgatgatcacggtaaacctgactgagcgccgtcatcataacaggataagtatcatacaatgtaccatcgaaatcccaaatcgcattttgataactcattaattatccattctcctttgtatcaaataggatagtgactggaccgtcattgaccaaagccacttgcatatcggctccaaattctccagttgcgacgcgaatcccagtcgctgctaatttttgattaaactgttcgtataagcgtttagcatagtccggtttcccagccgcagtaaagcttgggcgattgcccttcttagtgctagcaaaaagggtgaattgtgacaccgataaaatggcaccgtcaacttgggccaacgccaaattcatcttgccatctgggtcttcaaaaacgcgcaattgactaattttcttaaccaagtaatctaaatcagcttcagtatcatcatcacaaataccgaccaataacaaaaaaccttggttaatcttgccaacaatcgtctgatcaatcgtgacacttgcttggctcactcgctgtagtactactcgcatattaagtcgctcctatccttgaacccgtttgacttcgtaaacatctgggatgttcttcacggcttccataatcgtttctaaatgatctgtattgcgaatgccgactgtcacatgaatatctgccatcttatcgtgatcaatccgccccatcacgttatttagctgtttcgtatgtgcatttaaagactgtaagacatcgttcaatagtccaccacggttatagccgtagatttccaaattcgcctcatagagttgatcattcttagcgttggtattttcccaactgacttcagtcaatcgactgttcatatctgcccgatcaacgatattcggacaatcgcgccgatgaacagaaaccccacgtccctttgttacatagccaacgatatcatcgccagggactggattacagcatttactcaagcgcactaagacattgtcgacaccttcaataacaacgccgtcttcatgtttgattgtaatatggctaccgtttgctttaggccctggttgttgtgaatccttcgctgataaaatctcagcttctaatgctttttgttcactttcttcttttgcccgtcgttctttaatcgttaagcgattgacgactgactgtggtgagatttcaccgaacccaattgctgcaaatagttcttcttcggcattaaaattaaaatgcggtaggatgacagctatctcggctttagtaaggtgttcctttggtgtataaccatcttctaccaacagatgttcaacagccgtccgtcctttttcgacgttttcatcccgatcttcttttttaaagtagcgcttaaccttattccgagcacgcgcggtgaaggcgagcttaatccaatcacgacttggtgtcgcacttgttgacgtcaacatctcgacaatatcaccattacgtaattgatagttcaacggtacaattttgccgttaatcttagccccaacagcgtggttcccgacttcagtatgcactaaataagcaaaatccagtggcactgaaccttttggtagttcataaacatcgcctttgggtgtgaaaacataaacgcgatcgctaaagatatcgcctttgacgctttccataaattctgcagcatcatcggaagcatcttgaatttcaagaatttcacggaataaatcgagtttacgccctgattcatccagcttaatctgttccttaacgccttctttatacgcccaatgtgcagcgaccccatattcagcaacatcgtgcatttcttgcgtccgaatttgcacttcaagcggtttgcctttgggaccaatcacagttgtatggatcgattgatacatgttggcctttggcatcgcaatgtagtctttaaaccgaccgggcatcggtttccacttagtatggattgctcctaaaacagcatagcagtccttgattgagtcaacaacaacccgaattgcgagtaaatcatacaattcttcaaattgtttatgctggtcgcgcatcttacgataaatcgagtaaagatgctttggtcgtccataaatgtcgtaattcatatctaaatcagcaattgagtctttaatgtcttcaattgcttcttgaatataagattcgcgttgtgtccgcttagaattcatcaggtgcacaatccgatagtactgttgtgggttcaaataacggagcgagatatcttccaattcccacttaatcttactaatccctaaccggtcagccaatggtgcatagatttccaatgtttcgttagcaattcggcgttgtttttcgggtttcaaatgtttcaacgtccgcatattatgcaagcgatcggcgagtttgaccataatcacccgcaagtctttagccattgctaataacatcttccggtgattttcagccagttgttcttggtgtgatttatatttaatttttcctaatttcgtgacaccatcaacgattaccgcaacatctttgccaaacatctcttcaacatcacctaacgtgatattcgtatcttcgacaacatcgtgtaagtaaccagaagcaaccgtagcgggatccatcttcaattcagcaagaatccctgcaacttgaattggatgaataatatacggttcacctgattggcgaacttgttctttatgcacataagctgcaaaatcatacgctttttggacaaaagcaagatgctcagtattcatgtatttctgacataactgtagcacttcctgctgtgaaattactttttcttctggcatcctgcctcactccaattcctcttactcgattaaaaatgtactgaatacaacaaaactgactcaactaattaactgtcgagtcagtttgcttaacggcgttcatacgcagtattaattcctaagtaacttaataaacaataaataggaacgaaccaatagttataatctgcgtagcgcacaaccaccatcaatccaaataaaatcggcaggtacaaaatgtgataccaagctgcatgggtcttttgaacgcgatacccaatcataaaggctgcgcaaccattgacagccatgaatagcagtccaatccgccacgttttatcgatgtgcaagacaccaaacactagcggtaaaacgaccgccaagagaatggccactaataaatagcgtacccaatccatttttaaataacgattattcataaatttagtcatgttgtgcccctctgtaaaaagattacatctatcatactataaagtagccaattctgtcacatacgaaatcgcacttaacagatataacggcgcggtctcggcccgtaaaatccgtggtcctaaaccagccatcttaaagccagccgccgcaagcatctcaatttccttgggcgcaacgccgccttctggaccaaaaacacaaagtaatcgatccccaggttgggctgtttgtaagctctgaactaattgggcatgctcaccgtctttagctgactcttcgtaagccactaatttaatcgtcgctgattcttgtgcgaccgccgttaaactgttgcgccattcaatagttggtacatgcgtccggtgagcttgttcggctgcttcttgcgcaattttttgaagccgcgcaactttcttagcttgttttttatcatcccagcgtgcgactgagaattggctattacagaaaataaaccggtgtgcacccaactgcgtgcctttttgaacaatccagtctgttttgtcaccctttgacaagccgcatacaatcgtcgtctcaatcggtaattcaactgattttgtaattggcgattgcaccgtaacggtgactgttttgtcagttgcatccagttcagttaattcaccgatgaatgcttgttcatccggcgttaccaattcaacacgatgaccaggctgcatccgcatcacttttagcatatgatgtgcagtttcacccgttaaggtcacttgttgttctacttgaattgcttcatcaataaaataacgttgcatgccatactcctcttaatcgtcgtccgtcttttggcgtgtaattaatgccacccagtcacccatatgaagggcttcttgaacaacaaaatcattcaccgctaacgtttcacggacaagtgcttctttatctgcaataatgccggccagtaataggtgtccattgtcattcaataaagccttggcttggggaatcaagggcacgataatctctgctaaaatattggccacaatcacatccgctttcgttgtaatcccgttcaacaaatcgttgggatgggcatcaatgccagcggtcactgggttgagggcaaaattttccttagcggcatcaaccgcaacttgatccacatcataggcgcgaatatcattgactcctaaatgcgcagccgcaatactcaaaaccccagaaccagtcccgacgtcaattaaagattcaccgccgcgtaaaaccatttctaacatttgtacggatagatgggttgttggatgcgttcctgttccaaaagccatccccggatccatccgaatcagtgcttcgcgttcatcagtcggttgatagtcggtccaacttggcacaaccgttaaaaagcgagttagccgcgttggttgataatatttcttccaagctgtcgcccaatcatcatcggcgacttgtgccaatgtcactttaccagaaccaatcgctaacccaaagtcagtcaattgggcaacgcgttgttcaatcaacggtaatttttccggcacaaaaactgtttctgggaaaaaggcactcactgcagcacccgtttcaaggtggggaatactgtctagatcaataatttgatctggctttgcctttaaatgttcataatcggctgcgtcttcgatttggattccttccgcaccattttccgttaaaatattggcgattgcttccactgcttcattaacagtagcgaccgttacttttgtccattccatgtagcatgtctccttcttaatgcgggttgcttagtatttagggtaagcgtagtatttcttcgctaattgatcatctgcttgagcgacagttgcttggaaaacagtgtcatcccagtttaagataaaggtttcttcgtctgattcatcattcacaaaagcggctaattgatcttcgccttcatctaataagtcttgtaaatagttgaaaaagccccgaccgacttgtgcgtttaaccccttgcgaccagcaaatggaatcactgctaaataattgtctgcatattcaaagccgtccatcttactttcatcgaagaataaaatcgcatcttcataactgatttcatccgattcgttcaattcaccattttgatcttcaacggcaattgcttgttccttagtcacgtttaatgtgaattccaattcaatcgcccgagcttgtttgtcccagttgatattcatatccccactaaattgtaaatcatctaattctgcatcgaaaaatgctaacatatccatttcagccactgtattcaccatatccttttaattagtcgttatttaagtcaattttaaagttgaacgtattaacatcatacctgattatgacttgaatctaaagcaatcattcaaaaaagcccagaacaaaatgtcccagactttcaatcgtaattctacttaatgtgctgcttggttctgaccccaataaataacgtccatactctgatcgtcataacgttggaactcaattccgagtgctgcatcagattctgccatcacacgaccatatagccgcatatcagcttctggcgtgttgccatctgggcgaatggcatgcatcaacataaacttagccatttctgattgtagatgggcttcaatcggggccaacggatcaaaaaccatcgtgacaaaccgaatatcactactatcgccatcaccaattaattcaacaatcggaaacccaccaaaattttgttgttgttttaaataagccaataactggtcaatctgttcttttgtgaaggctgatttataaaagagaaaatgccaagtttgtcgtttcatcgtgtcacccacccgttatttattacatatagtatgccatactgtcaccaacaacgcgaacttagtctttttttggtaattgattcgattttggttggtgatatgtctttttcaagccagcaaatgtcgcttgaatcttttggtaatgcatttcatcgttacgcgcatgcttcaccaactgggtaaaatcgtgggactgtaagtccttttctgtttgttttttaaaccacaacatatcatcactccttatgtaattttattatacaacgaaacgttatcatcgcagtcttaaatttacttttaaaccaaattgccgtaaactaacactattcattaaaggagtctattatgggaaagaagaaaaagcaaaacgcattatccaaaacattagttgaaaaaattctagataaacaaaaagtggcctacacccaacttgaattcccaacagaggaagtccacaacgttgcccaaatgaaggtcgatcatctcgatatcgatgaacatcttatttataaaacattggtgctctctggtaagagtaccggcccaatcgtcggtgtcgtcccgattgattgtcatttagacgaaaaaaaattaagccaaatttctggcaacaaaaaaattgcgatggtcccattaagggagctcgtggccactactggctacgaacatggcgctaacacgcccgttggaatctgggaacaatcccactatccgatttacattgaccaacaggctgaaaaggaaccattcatctatgtctcatccggtaaaattggccgctcaattcagattaatccgcaagacttacagcgggtcactgaagccacctttgctgacatcagtgaagcctaaaaatatgataagaggggctagaacaattcacttgttctagcccctcttatttttgagtttaatctaagtattgggccaaattagcaccagaaatgatgacttgttccttcagcaaatttggttctttaataatattatgaaccaccgtttcgggtaaaacatcattttgtgcgagcatttgcagagcatcgtcttgcatcacgacttttttaaccatattatgtattttaatcgttgcaacatatttttgcgattcccgttcttcaaccacttcgtagttgccgtaataatgtttatctgtcattaactcatccccttaaggttaataatatcatatttcaacaaataaaactaagtaacttatcctataataaggggaaactgttaaaaaataccaaaaaaaaagcaaaacaataactgttttgctttttccattatagtaaggagagtacaggattatattaggactatattttaccgtagtaccagtatttctgtactcttctgggacaatattgggacaatagaatttaaaaatttaaatataatgtatttgctttaccagtctttttatcatgaataaaggccgtgtgtttaacagaaccgtctggattatagacatctgatttttttaaggtcatgacatcactcacccgcagtagggtggctttaccaacttgaaagatggtgtagttacgccgacccgcccaaaaactatctagtagagaagtaataaaaagtattggaggcttcaccttgtcaaaaaaattatcgctcgcccaaaaaattaacgtgatgcgggctagcgtcatgggtgccaatgatgggattttatccgtcgccggaattgttatcggtgttgccggcgctacaagcaatagcttcgccatcttcatttcgggaattgccggaatgattgctgggacgatctcaatggcgatgggcgaatacgtctctgtcagcacgcaaaaagacgcacaggaaatggcaatcattaatacgaaattgaatttaaacagtaattatgcgtctcagatggcttttgttcggcaaaaatacgtcaacactgggattgatcctgaacttgccgatcgggctacacacgaaatgatgactgctgatccgttgacgactgtcgtacgtgaaaaatatgggtttgtcccgactgcttttaccagtccttacgcagccgctgttgcgtcattcatctcatttccaatcggttctattttgccactagccgcaatcaccttattacccaaaaccattcgcgtgcaagccaccatcattgcagtgatgattgcccttgcgctaaccggctacagtgcagccgctctcggcaaagcgaatcgttcaaaagccatgttgcgcaatgtgatttccggattattaaccatggtagtcacttacgctattgggacattattcaaacaataatcgcttagaaaggatttttttatgacccctcttaaagccccactcaaaacaactgaaaaaccccatcaaacgatggaagaaaagatgaatacccttcgagccggcgttctaggttctaatgacgggattctaaccgttgtcggtgtgctctttagtgttgccgccgcaacaaccaataatttcaccatttttatcgctggacttgctgatttattagcctgtgctttttcaatggcggcgggtgaatatgcttcagttagttcgcaaagtgacacggaaaaagccgctgttgccattgaacaagcacgcttaaaaacagctaaagatgatcaaattaaagaagtccaagctttttacgaagccaaaggtgtcacttctgaaacggcactcgcaatcgctaaggacttaatgcataagaagcccttagcaacaattgttaatgttaaatatgacctagagcttggccattatatgaacccgtgggccgcagcgtttgcatccctcttctcagccgctttcggtggcgtcttcccccttgtgacaatgattctactgcctgaagcctacaagatgaccggcacaatcattgccgtcaccatcgcggtttccattaccgcgtttatcagcgctaaactgggcgatggcaaagtcaaagtctccattattcggaacatcctaattggtttaattacaatggccattcactacgggattggccaactcttctaaaaaaatccgtcatcatttgttctaatctaacttaaattcagccacaaaaaaaggcgtcaagctaaagttaacttttagctcgacgcctttttacttatctaattttagttctcaagaactgggcaattttttcatggccagcatcattgggatggagactgtctaaactcagctcagccgcttgttgtgcatccgcaaatgacaacgctgattcgttaaacaaactgatatgctgaacgccaaacaagtccgtcacttgcgcgatcgctttttcataatcttgttgctgataaccgccctgattgacggccgaaaagaagtcagtcccaatatgaacgtgcgagataaaataaaccgtcgcttgtgggtaatgtttcgtaatttgtccaagtaatttttgtagtgcgccgtagaatgttgctgtggactgatcaccaaattgaccaagtggtacatcacgaccaaagtcattcacacccgcataaatcaataataaatccgttgattcaggaatggcttgccagcgttcaaccatcggatcatacggttgggcaatcgtcgaccccgaaattccgagattggtgattgtgggaatcgcgagccattctgctaaccactggtagtaccatttgtgtgcgtaatgattacgttgatccgtgatgctatcaccaagtaccgttaaatgttgatattgtgtcatttgctactttgctcctaattctgagtaatccgtcagttgccaactaaattgatcccaataattggtttgctttaatgttttaagcgcattgaattcggctatccgattcgtcgtcagacgactcttatgccgtaactctgccgataaatacccaatatggcttaagatcaccggcgtacctaccaaatttttctgtgtcagttgccgtttgatttcctgtggcgttaaatacggtgtttgttgcgccgttatcaacgtcccagtcgttaaaacggcatattccgatattaatagcaggtaggacgcttgttctgtcggtcttaaatgcgccgtttcattgcgaacagggacatgatacgtttgcgctagttctagaacaattgcatagatttcaggcgttaacgttgccacaaaatggtgcgatgtcaaatgcgtgagttgtaacccactcgccaaaaagcggtcaatctgcgcttgaaactcacgcttaacatcagcaatggccaactgttttggatgagtttgtaaggtttgataagcatgacaaaacccagccggggttaccaagctgggaatcgtcagtggctgactaattgggcggtctttgtcgaaaaccaagtgcaatcccattgccgtaatcccatgttgctgggcgagtgccgcactcatttcaaaatgaggcgatgtcacttgcgcattagtggtagaaatcacgccagtttttaagccagtaatgattgcgcgcgaaatcggtatggtcatcccgaaatcatcagattcaataatgattggttgcatcttaacccacctattctgccgctaagtcgaactgtccaataatggtgtcagtcgtaactgttgttggtagtggctctgctggtgcaaaggtggcgttgctgctgacgaccatgatagtcgttgccttttgggcggctgctagttgttgccagtcaatatcaacaatcgcttcaccagctttgacacgatcacccgcttcaacgtgcatcgtaaatggcgcgcccctcaattcaacggtatcaatccccatatgaatcagaatctcaacattttgctttgttgtaatcatgatggcgtgtttagtggggaaaatcgaactaacaacaccatcaattggtgcgctaatcgttgtttgccgttcatcaggggtaatggcaaagccatcgccaactgccttgcttgcaaatacttcatcggtaacttgttcaattggtaaataactgccagcaacgggggctgttacctgtccaactggtccttttttcaaaaaattaaacatcgttcttcctcttttcttaaacccgcatcatgatagcttcataaggtcgtaaagtgatttgctgaccatcaaactgcggttgttcgtaattatccatgagcacgtccttgacgtgtggtattgaacggacttgtgtttgaccagtaaaattagccatcacgcgaatcgtttcagtatctaggtgtcgttgataagtgtaaaccgcttcgtcctctggttcaaataattggtagtccccttcaattaaaactggcacaagcttacgcattcgcactaattcttgatagaatgcaaagacactattgggttcatgaatcttagcggcaactgagtaatcatcgtgctcaaccggcattaaccatggtgtcccagtcgtaaacccgtgatgcgccgtttgatcccattgcatcggaattcgacagttctcgcgtaatttctgctgtaaaatcttaatcgctaacgcttcatcaatcccgtcgctcaacatttgctggtaagcattgatggattcagcatcttgatattggtcaacggcggtgaagttcgcgttcttcatcgcaatttcttccccttgataaatatacggtgtgccttgtaagccaaattcgactaatgctaataatttagcggattgatcgcggtattgaccgtcatccaagaagcgcgaaacggcacgcggctgatcatgatttgaccagaataatgcgttccaaccaccaccggcagccatccccgtttgccaatcactaagcacccgttttagatcagacagccgataatcgcctagtgtccatattttttgccaccggtataatcaaccttcacatgatggaaggtaaacgccatcgataactcttcacgggctggattggtataacgaatcgcttcatcaattggggttgaggaaagttccccaaccgtgacaaattggttcgggccaaagaccttttcgtacatttcatgaatgtattcgtgcacatgtggtccattcgtatagaaattgcgcccatcgtcgcttggcgttttaaacgtatcattcgggaagtctttatccttcgagatattgttaattacgtctaaccgtagcccatcaatcccaaggtctgcccagaattgcatcattttaaaaatctcggcccgcaagtgttcattccgccagttcaaatctggcatgctcttttcgtataggtgaagataatattgatcaagtgctggcacatattcccaagcactgccactaaacttggataaccaattatttggttcgtgtccatccactggatcacgccacaaataataatcatggtacggattatccttgcctttgagactctcttggaaccagcggtgttgatcagaagtatggttgaccaccatatccatcatgattttaatcccacgtttgtgggcttcatttaagagtcgttcaaaatcggttaaatcaccaaaaatgggatcaatgtggtaatagtccgcaatatcataaccgttatcacgaccgggggaaacatacattggcgtcaaccaaatcaattcaatcccaagattttgtaaataatctaaccgttgaataatgccgttgatatccccgattccgtcaccgttggaatcttgaaagctccgcggataaatttgataaactgttgctttttgccaccatgccatgcgatatctctcctatttcagtcgtttattttgctgttcctggtttttgtggtttagccattgcttcaccagctgtcatttgatcgttataaccccaaacgagcgttacaataaatggcacaatcgttgcaaccgctgatgacgcgatgaaaatccataagtttgataaatctgctaggtgttttggatctaagaatgatgcaaagccgatccacgaccccgcgaaaccgaacatattaccgtggaataacccactgacaaatccgccagcggctgaaccaagtaaaccggcaatgaagacgcgtcggaacttcaagttgaccccataaatagcaggttctgtaaccccacagaatgctgaaaccgcaccagcaaatgataattcttttaaagctgttttacgggtcttaatcgcaacagctaaaacagcggccccttgtgcaatcattgttgtgcttaaaatcgcgttaaagtaactgtgacccgttgcggcaacatcgttggcaataattggtaaaatcccccagtgtaatccgaagataacaagcacttgatagaatccaccgattaataacccagataaccaaccactctttaataataagaattgaatcccgaatgctaaaccatttgataaccaaataatagcaggccctgtgatgtaaagcgtaatggcagaaacgactgcaatcacaatcaatggtgtaaagataatttgtaagtagcctggtaaccagcctttaacccatttggttaatttagcaaccaagcagcgagaatcattgggaaaatcgaatatgtgtagttgaccattgggaagtttaatgacccgatttcaagcaatgatttcccgtttaaagccactaattaaggatgcaccagaacaccaccgatgacagcggttaaaactggatcaccttttaatttcttagcggcagtgaacccaaccaacatgggtaagaagtagaaaacagaatcacccatcgtacttaagacaatgtacgcttcactcttagcacttaataacgcgccaagttgtggcatcgttagcatcgccaagacaccttttaaaatcccgccagcagctaagataccgacaatcggactcatcgcaccggtaatcacgccgattaattgattaaaggcttctttaacatggccccatggcgttaaattttgttggcgcgttgttgcagccacaacttgggccgtttcatcttcgccagcaaactctgtcccgatttctgcaatcacggcatcataaacggcagtgacttggttgccaatgaccacttggtattgcccagaggccttttgaacgttaatgaccccatctaatgctttaatttcttcggtcttcgcttttgattcgtcctttagataaaaacgaagccgtgtaatacagtgaattaaactatcgatattttctttacccccgacaccggcgacaattgcctgtgcgagttgtgaataatccttttgagccataataattcctcccgaatcttattgaattaaaagtagcatgaataaaagcgctttctcagtacaccgtaatcatatatcatgtacgtacaagttttcaacactttttaaaaccgttttcttgttagcgcttaatctaaccttgcaacttcaccgaatccccgttatgataggaatgagaaaacaaattggagaatatcgaatggctaaaaaatatgaaatgatttatcgagatctcgtgcgcaagattacgcaccaactctatcaaagcggcactttcttaccaagtgaaaatgaactcactgaactctacggtgcgtcgcgtgaaaccgtccgcaaagcattaggtagtctacttgaaaatggctttatccataaaattaaagggagaggctctttggttctcggtctagacaagtatgcttttccgatttcaggattgaccagttatcgtgaattagatagtcttttcgatatgcatactgacactcaagtcttgcaattaacacagacgaccgttccccaaacccttttccatcttgaatccgaagagcagttacctgccacttacattcaacggctgcgcgtcgttaacggtcagcccctggtaatcgataacgactacgtcttaactagcatagtcccccacatttcaaaaggggttgcacaagactcactctatcgttactttgaagaaacactcaaactcgaaattggttatggcagtaaggagttcacggtgattcccgccactgaaggacagtgtcagatactgaacctaccgcctaacagctccgtagtcagtgttaaaggtgtcacccatctacaagataataccctccttcaattcaccgaatcgattcaccgtgccgataagtttaaatttatcgaatatgctcggcgtaaaattatctagtcaaaaaaaacgacacccaccggctgagagttgccagatgggtgtcgtttttttatttgactgcctgtgttttaaaaacagcgatttgatttaaaagttcactaatgcgtgttcgatcactcttttgttgttgacggctcgttgtgagtttctgatataagtttaactcatcaccctcgttgaaggcggtgaccatggcttcagcggacgagacgtaatcagtcattactaattgtaactgacggttaatttctcgtaattcttttggcggatttagtaatgtgacttgatcaataaattgtttaaaaacccgtaagttacgttgaaaatattcgtttaacgattccaaattttcgcccaccagacagcgccctttgatgatgttcttgctggtccgggtgtactcactaaatactgtttcaaacacgataaaccgttctaaaaattgattccaccgtacgatgtattcctgagtcgatagttgatccgctttgacactcatggtcgttccccctttaatataatatctaaatgcctatcatgagtataaatatatactaaatacagataaaaggctaattattagcctttgttaccgataacgatttcaaattgcgtttcattttacaaataaaacatgacgtcctatagttaaggcaagccaaaaaaaggatctgattacttgtccaaccaacgttatctatctggaacagcactaaaactatttacattcaccctactaaccggcacgttcacaatgtctatcagccaatctgccctttcaactgcttatccaaccttaatggcctattttgatttatcagccacaactgttcaatggctgacaaccggttttatgctcgtaatgtgtgtcatgatgccgattagtccttggttattaaacaacatcccattcaaacgactctacatggggattttaagtttatttactattggaacgctattaattgtcttcgctaatcagttcggttgggtattgttcgggcgggcgttggaagccatcgcagtaggtgttttatttccatcgtttcaaactgtcttattaaccattactgctgaaaatcaacggggccaaattatgggcctggctggtttagtaatgggctctgcactagcttgtgggccgattatttcagggattattctcaactacttcagctggcgaggactattcatcgcctttattctgattatcttaaccgtgttagcaacagctaacttcactatttctgatgttatgccggctaagccctatcaccttgatggtctttccgttttatgtacaactggattaatcggtttattatatgtcatcagtagcgctaatcatcctactatcaacccaatcggactctggggtatcggattagtgagctgcctagcactgggttattttgtctaccggcaactcacccagacaacgccacttcttaatttacatattctcggttaccttaactacgatattgcggtcggattgactgctatttcctatatttcattgattgtcaccacagtcatctacccattatattttcaagctcaattgaagttgacgccgcttctttcaggattagcattggtccctgctgccgttgtgttaagccttttgaatccactcgcgggccggttagctgataaaattggctttaaaccgaccttactcgttggcctaaccatgattagcattgaatggctagctttgattggcttctaccaatggctgtcattaccattgatgatcctgtgtgcctgtttcatcgaaggcggcaacgcatttgtcatgatgcctgctgttacacttggtgctaatagcctgccggatcaagtgctcgctgacggcactgccgtcacaaccacgattcgtcaaattgcgggcgcgctgggcgtcacccttgcaactctccttttaagtgtcgccggttaccaagtcgtatttattagtttgctcggcctgaccttaattggtctcggcttagccactcaactacaccccaaataagccacaataaaaagcagattagcgatgatgattgtcatcgttaacctgcttttttaataccggcgttgcttaattaagataagtccccatgtcattaaactaaatgttgaaatgatcgcgccgataattagtcccggcgcacgatagactaagcgaacttggttagtccctttctcaagtggcactgcaagcatattgcccatgactcgtcgtgtacgaactgtttgatgattgacttgcgcatgccaaccactgtcatatggcacacttagataaagtaattgatcagcggtcttagctggtactacaccagcaatccgaccattatctgccgacagttgttttaggtcgatctttaagcgttgttgtgccaactgatcaaaagcttgatcgaaatgagcctggtctaaactagccacctgaatcttacgaaaggctttaggttgccgactggtaattgtcagcgttagttgttgccctttttgatagcgacccaaaccaataatcgtggtcccattcaattcaatcggtactttatgtgttcggccattaattttcactttcagctttgataagttttgttgcggcaagtatagataagcatatccacttgtcttaacttgcgttgtaaacgtaatttgccgacgtttttgcgcttgtaaatctaattgattatattgataaaatggtgtcgtttgtcccgtcatcgcttgcataattcgatcttgattttcaaacggctcatgtgctttcaaagccacgtgtgctagctggtcattaaccgcaaaccctaagcctaacgttttatggggttgtgtcacaacctgtccttgcttagcaattaggtcatattgattggcaaatagtaggtcagtcagcacagtatgcccaatcccgttaatccgccgggcattcttactataaaaaccgagattaaccaacatcgtccgcatccgctcatcaagtgtcgaagaataattgttcaatgtatactgtccaaaggtcaacgcatcattgtacccataatacggttccttaaacgctttttttaagagaatcgcttggttattaacgcgatagaaatcaggtgtttgccgttcaagctgttcaaagagtgctgcttggcgttggtattgttgcgcataaacaacttgatcgcccatcggtaacttagtggtcgtcaagcggccattaatcaccagttcactaaacgtcaatacggctcccagaccaatcacccatggttgccaacgtgctcctttttgccacgctgcaaaaataacgctagccaaaaccattagtccgattaacaaccagagcgattgtttctgcacaccacgtacatgtggcccatagtagagcgccaactggccaatgctgagcaagccaccgactatcaaaataaccaggcgtttcgtttgacgtttaccgattggttcaatacttgcttcataggcaatcttgatgagaacaaatgccatcaaataggtattccgatatggaaacccttctggttgctggaacatgtgccacatcgtattaaatgtcgttacccagaaacttaacgctaaactaacaattaaaaagccgttcgaccactttgcttgccgtcgaatggttggtagacagaaataatagaccgcaaataacagcgctaatgtactgataaataaagttggttcatgaattaagcgttgcgtataatggctgccgccgacttgaaattggctcaaaacttcccagccaaactgcggggttggataaaaactggttgcagcgattgtctttttcccagtcttcaacattccaagtaacgacggcaataatacaactgctgttgtgccccccgcaatcaatgaggcccaacaaaactgccagatagcctgccgccagtgaaccactagttgccaccaagactgttggggttgtttccatttgattaacaaactaattgcatacaaaacggcaaatagacatgacatataacccaagtaatagttggtaaagatagtggcaaccaacatccagatatataagccaggacgcccttttaaaaatagccgttctaatcctaagatgaccagtgggaggaaaatcagagcgtctaaccacattaggttataaaagttcattgccacaaagccacttaaactataagctgttgcaaaaattagcgcggaaaaatgatattcaggctgacgcgtctttagaaaatgggccatcgttaaacccattgccccaatcttcaaaataatgacatacccaaccaccactggcaactggctattcgaccaaaataggagcagtaaattaaaaggactgattaaataataagccgctagcggtaatatatcgccacccagtgaaagcgaaaatgaatacgtactgaaattcatctgggccatttgccgtttaaactctgccaaaaagggcatatattgggtaccgagatcactaatcaataaattatgccgtccaaatggcactatttggagcattgcatatagccccaccattaataacatgggaactagcacactcaataaatagtaactgacagctgttttatttgttctcttcatctgactcacttcttttgccttttctatagaataatacacactctaaacaaaataagccacccagacaatttgtctaggtgacttattagtaagttgcttacttcatcataccgagggtgaccccaccgacaatgactaataaacagccaagtgtgacgtaaaccatttcttttttcgttttttgctcacccaataggtaaatactaccgattgttgagataataatgccacattgtgataatgaatagctaattgctagaccaatatcattcattgaaatcaacataaataagttcccaagaccccataataaaccagtactaatgttgagtgctgttttcttattgaagactgctgtcccaatgccaacaccggcaaaaattgcagcaccgacgaacatcccaattgcttgtggtaaaacaattgatgttgcgccaatgtgtgaccagttaacgatgattgtgtaaccaccataaccgattgttgataagattaatgctctaaaaccacgtgcaaattgtgtatcttctttagcagcaacactgctcttcggatccttcattgaagttaatgtggcaccagcgattaagatcactaatgcagtaatcccgaagatgtaatcgtgcgttgtcttccattcatggaataacaaagcacctgctaaagtgtttacaatcaattgcatcccggttgataatgggactgtcttagaaacacccatcgcttgcattgattggaactgttgtccttgaccaatgctccagaataaaccggaaatgataccgattaccataatccgtaagtttaaagcgggttgtaatactaaaaaggtaccgattccaaaaaccaacgcaccaattgtcattcctaaggtttgttgataggcattcccgccaagtttgccactcactaacccgatactaccccatgcaagtgcagggattaatgcaattaaaatagccatttataaattcctcttcttctctaaagtacaagaatccattatacatagttttatatccgctggctagtaggaaaacggcaccattcaatcgttaccaaccttcactaccgtcatgtaagcaactgtcccagtcgtgattgcgcttacgtaaattttacgtaaaaaagcgttttttttagtaaaaaaatcaacgataagcgttttcttaccgttgataaccttaatgttttcgctttgcatgttgtaggacttgatataacaggacgccaatcatcacccctaatgtattaaacatgagatcatcaatatctgccatgccagtccctaaaacaaactgggcggattcaatacacagggataacagagccccttcaataatcgtaatcaaccaatcccctttgcgctgtgtcaatgaccgtcgcaataaaccaaacgggataaaccacgcaatgttcccgtagaagttataccaataatcaatctgggcgggcgcttgccgtaacttgaaagtctcaacaaacggtgtcaaattaatttggctaagtggtcgttgcaaatggagctgcatttgccacggataataaatatgccgtaaaaccgttaatgagaccaataaggcaatataaaacacaaataacaatagtttcagttctgggagaagctgtattttgcgtcgtttgattaataagtaccccaaccggcacacaataaaaaccaaacaatacaaaatcgtcttatctaaactctccaccgtcaatttgatgagtggtaaatgattatactgttccccccaagggaggatccattgttcataaatacgcccaagaaataccaaaaaaccaacctcacttattccactaatttaacctatctgttcattattcaatgagtaattaagtccattatagctgttttttttcaataaataacgcttaattactcgactaaagtgaatcttaaactattaggtatcgactgcccaactttagcccgatgtgtgcctactgtgctatgctataatagaagttactataaattgaaacaggagccttttatgaaagttctattatattttgaaagtgaaaaactactcgctaaatctggaattgggcgggcgttggatcatcaaaaacgcgcgttaaccaaaatggggattgactatacgcttgatccgaatgatcaagattacgatatcttacatatcaatacatacggactcaaaagccgcagtgtcatcaaaaaggcgcgtaaaatggggaaacccgtcatttatcatgcacattcgaccgaagaagattttcgcaactcctttgttggttccaatcaactcgctccatttgttaaacggtacctcgttagcctctatcaacaagccgaccacttaattacccccaccccttattcaaaatcattattggaaagctatggtctaaccaaccctatcgctcccatttcaaacggcattgatttagctaagtatcaagccacaccagctaaagaagctgcttttcggaatttcttccatttaaagcctgatcaaaaagtgattatctgcgtcggcctcttctttaaacgcaaagggcttctcgattttgtcgaaatcgccaaaggtctacccgaatacacctttatctggtttggagatgtacctatgtacagtattccagcaaatattcgccggattgtcaaacaggatcatcccgacaacgtcatcttccctggttatatcaaaggcgatattatcgaaggcgcgtatgccaatgctgacttatttttcttcccttcttatgaagagactgaagggattgtcgtcttagaagcccttgcaagtcatcaaaaagtattggtgcgcgatattccggtttaccatggctggcttgccgatcaacaaaactgctacatgggtcacactaacgcagaattcagtcaactcatccaagcgatggtcactaatgccgttcccgatttaacagctcaaggctaccaaactgcgcagtctaagagtattacagaaatcggccatgaattacaagccgtttatcaacatgttttggcgccagatcaactgaatccaaagtacgatgccatcatgcggcccgcgaaacgttaagtttctgtttaaactttaaactgctatttgcgctaatgccgccctcgggttaaaataaggcattagcgctcttttagttctgttttttgaaaggatgtcacattatttgaaactcacaaaaattaaatcattcctatccacgagattaggcttcatgagtttgttagtctttttattttggctaaaaacgttattcgggtacttcaccgattttaacctcgcagctagtggcttcttacaaattgctattttaatctttaatccggtcgcgacgacgctccttttattcggcatcattctttatgttcgccagccgcatctcagttattggttgggcttgattatctatgccgccaacaccgctcttttatattttaatgtcatctattaccggcaattcaccgattacatgaccatcaacaccatcttagggtattcaaaagtttcggctgggctcagcaaaagttcactggccctcatgaactggcatgatgcgctgtattggattgatattattgtcttagccttgctgattttaaccaaggtcatcaagatcgacaaacacgcatttaatcggtggtgggccttcagtattacctcactggccgtcttattatttggcatcaaccttggcttaagtgaaatcagccgacctcaaattttatcacggacgtttgatcggaactacatcgttaagtacctcggcatcgacaccttcaccgtctacgatgctttcaagactactcagaataatcaagtgcgtgcccaagctgagagttacgacttagatccggtgctcgactttatgaaagagcattacgctgcaccgaacgctgaatacgcaggcgttgcgaagggcaagaacgtcattgtcattcatttagagagttttcaacaattcctaatcgactttaagttcgaaggccgcgaagtaacgccatttttaaatagcctctatcatgatcaaaatacattaggttttgaaaacttcttccatcaagttggccaaggtaaaaccagtgatgccgaaaacatgatggaaaccggcgtctacggtctaccacaaggctcagtctttacaacgcttggttcggataacaccttccaagctgccccatcaatcctcaagcaaaacggtgactatacgagtgccgttttccatggtaatgtgggcaccttctggaaccgcaataacgtctacaagaacttcggctacaactacttcttcgattcttcctactttaacaccgatcctgataacgtcttacaatacggcttgaaggacaaattattattcggtgaatcgattaagtatctcgaacagctacaacagccgttctacacgaaattcatcaccgtcaccaaccattttccattcccattacccgaaaaagacggtgacttcccccgtgccacaactgataatacagcggtcaataactattttgcgaccgcccattatcttgaccaatccttagaagagttcttcaattatcttaaagcatctgggctctatgataattcaatgattgtcctctatggtgatcactacggtctttcgaattctgataataaggccttactcagtgtactaggccgcgacccagaaacgtggaccgactacgataacgcccaactgcagcgtgtgccttacatgattcacatgaacggtttaaaaggcggtatccaaaaacaatatggtggcgaaatcgatgcgttaccaacaatgcttcacttactcgggattgataataaaaattacgtccaattcggcaccgatttattatcaccacaacatgatcaagtcgtggctttccgaaaccataactttgtcacccctgattacacagtgctcgatggcaccatctacaataatcaggatgggacagaagtaactgaaccaacagctaagttgcaaaaacaagtcgctgtttggcagaaacaagtgaaccgcgaattgagtttgtcggattcagttaacgaaaagaacctattacgtttctatacaccacaaggttttaaaccagtgaaccctgccgattataactatctgactggctatcaacagcttgtcgatattcaaaataaattaggggctaattcaaccagtttattctcgcaaaatggtgatcaatcgactgttgggctctttaaaaccgatgctccagaattagcgggtgatcaatcaagcctcacggaagtgccaaaatcaaaggccctgaaaaaagagtctgatgcaacagcaactagcgatacggaataatcgtcaaaaaaaacgcaaggacaacatatattgtccttgcgtttttttgacgttagctaatcacctgcgattgaaaactattaaaaacggattcctgagtcgttgtcatgattacgataatttgaaactgcgctgctaccgctctgacatcatttaataattggcgagcatccgttggtggaagttcatctaagaaatgcttgaccaccacgagtcgctggtagcttgctaaaccgcgaatcaattgaatccagaactgatcgactggcggtaattcggtgcccaataaactccgactgcgctttaaatgctgttcaatcaacatttttaacgttggtgcaagctgctttttaggaagcaacaagttatcccaaccggacataaagggtagaatcttaggcgcctcataatcaatgacatatgggggttcaggtgattcaaggctctgctgaatcatctccggttgactaaaatagacctgtccaagtgctaagggttgtttatttagcatttcaatcacgcctttctcattttcctaaagcgagtaacttggcaccaaccaataatgtagactggtgcaattagactgataaatggtgcccatagttgggcgaatacttgattggttaaattctgcttggtgctctcatgcaaaatcggattcaataacgaatgactactaaagtcagtcagatgatttttaaataacggttgaaatgctcggggaccttgtattggtcgcaacggcttttgtagccactgttgattaatcagctctaatccgcgccaatagtaggaattgactaataaccaacctaaaatcactgtcacgcttgcgctgattagtaagcaaagcgccgttaacgtataataattgacaattgtatgtcgcgaccaattcgcactagtgaaagtatcgatatcctgacgcatcttcttaaacgcttgccaagtcaaaataccaatcacaagtgcgataacgatagtcagcactaccgcgataaattgatagcgtcccagtaagacttctttactttgaaccagatgtgtcagggggttagtcccctctttagttgtgttaaagttggctaattgctttttcaactggttgaggtcatgtcgttctaaactgatcaagctcagcgcaatcagcatgacgcctaaaaagaggcaatccacgagatagattaacaaagattggcgtaaataataccgaatattagctggaattgatttaatgaagaacatgacccacctcctaataaagatagtgtaaaactaaagtatgaaaattatatgaactctgtggtaaaaattaaaaaaaacgccttaattaagacgtttttttagttcccttaaattgtcttttcttttctttgaatcattaaccaataaacaagtgctgtcagccccattgcgataaacgttgcccccgtataagcgtgaataatcgcgaattgatttaagaccaagtagctgaccaccccaatgacccatgcaatcatggctgtcagatgatatcctttggtgtaccagtatggtccagcaacttcattgagcgcaccaacattgtagtgccgccgtctaataatgaagtaatccaccaagaaaactgcgatttcaggtcctaagaacatcccaatactatcaaggaaggtttcgaaagtggttaaaaatgaggcaacatagaccgggataaaggtcatcaccgttgccaataacgtcacgacccacaatgccggcgttaatttaaatttcggaaaaatattggttaaagccgatcccgcagccattagattcaccgcattagctgtcgtactggtaatcacgatcactaataacgctaaaacacctaaccctaatttggccgcaatggtgcttggatccgcgttgttcgggtcaaaatgatttaacgtaatcgctgtggcaattgtcgccgttaacccgatgaaagcaaaccagaacaggccaatattggcgcctaagaatgaatagcctgtggctgctttcttgttctttgaaaaacgactgaagtccgcagcagcggttacccatgcaaggttaaacgctgctaggatatcgaccgccttcccaaattcaagccgcaagttgctggctggtcgccacgccactaagtctttgaacggtaccattttgaagacaatgattgattcccaagtgactaagataatcactaagatgatgccaattcgttcaatccagcggacggatttttcaccgagcgaaatactgattaaatgcaggacagacataattagaatcccaacaatcaagctcatccggttagtggctgcatcgttgcctgaccagcccatgatttccttgatgatgaagctcactgaagttgctgcaatatacgtattcaccgcagcccaaccgatgaattgtaccacattgataatcgatggcaagacggatcccttcacgccaaatgaggcccgcgttagccccatcgcccccacaccagtttgataccccatgtaggaggccagtgcaagcaagacgtacgataaacagccaacaactagtaacaacgtagacccttgaatcaagccagttgccgcaataatgccgccgataaaccaagtgccgttattcgcatttgcaccaatccaagttgcgaacaaatcccaactgcccatcgttcgtgcgtccttggatactgcatgaattgtttgttgctttgtcattttgataccctccacttggttaattgcattaaaaaaagacctactcctagacagagcaggtccactaatgtacttgttaaccgctcctttgtcagcctcactggactgcccttaaaaggatttatatttataagcattgtattaaacttacttgccaaagtcaactcatgattgttatactcactaataaaaaaagcgaggttggataaaatgctcattcaaaacgtgcacattgagaatcaagaatcattgcagtcaatcagaattgaaaacgggatcattacagcaattgaggcacagctaataccgcatcctaatgagcaagtcatcgacggacatggtcaattggcattaccgccatttgttgatcctcacgtccatctcgattcaactctcaccgccggccagcctgaatggaatgaatctggaaccttgtttgatggcattcggatttggtccgaacgcaaaaaggatttaacccacgacgacgtcaaacaccgcgcaattcaagcactgaaattacaagccagccatgggattcaattcgtccgctcacacgttgacgtgactgatccagacttagttgcgctcaaagccttaatcgaggttcgcgaagaagtcaaggattggatgacgttgcaactggtagcctttcctcaagaagggattctttcttttccaaatggcaaagcattaatgaccaaagctgcccaattaggggttgatgcaatcggtgctattccacatttcgaatttaatcgcgaatatgccgtcgaatccttgaagtttgcttttgaactcgctcaagaatatgatttactattcgacgcacataccgatgaaattgatgatcccaattcacgtagtcttgaaacagtcgcgactctcgcccttgaaacggggatgaaagacaaagtgacggcttcacacacaactgccatgggctgttacaacgatgcctatatgtacaaattgatgcggctgttaaaaatggcggatttaaacttcatcgccaacccacttgtcaacctatttctcggtggccgttttgacacttatccgaagcgccgtggtttgacgcgcgtaaaagaactgactgccaacgggctaaacgtcgcttttggtgaagatgatattcaagatccatggtacccaatgggcgatggcaacatgcttgatgtgttgtatagtggcctactggcaacccaaatcatgggccatactgaaatcatgaatgcctatcgcttcattacttacaatggtgctcgtgcaatgcacgtccttgaccaatatggtctcgaagtgggtaaacccgcccacctgattctaatggatagcgacaacttctacgaggctctcaacaagcgcgccgctgttaccctctcaatgcacgctggcgaaatcatcagtgaaacccaaccagctcaaacgcaattgcatatttaatctaaaaaataggcgtcacgacaatttaatccttgtcgtgacgcctatttaaattggtttagctttcacttgtcacaatcgtttcatctgggaaagttaaggtaaaagtggtcccttgttcaggaatactttggacctcaatcgtcccataatgtaactggacgagttggtggacaatcgccaaccctaaaccagattcaccatatttggtattcttacgtgatggatctgctttgtaataccgttcccaaatatttttgacttgttcgtccgtcattccgataccggtatcgctaatcgttaagattgtttcgtggaaaccagcttccgcagtcaccgtaatttgcccattttctgtaaactgaatggcattttgcatgatgttaaacatcacttggacaaaacggtcatagtcggcatagattgggacattctcttgggcgtccaagatgagcgtatcaccggcttcagtcgccttcttctcgagttgctcttgaatattctggatagcttccaccgcattaaacgtttgcgggttcaatttaatttggttagtccgaatcttttcataatccaggttctcgttgactaagcgaatgagtcggttggtttcattttgcattaatgaaatactcttggcgcgcatctcttctggaatcgcatcatattgcaacccttctaacagacccttaacggtcgttaaaggcgtccgcatttcgtgagcagcgtcggccatgaattgccgccggcgatcttcttgccgcttaatttcctcttcagattcattcaacgaatgcaccatctcattaaaatcggtggccaaatcatccaattcatctttaccaggattcttaatctgaacattaaaatctccttcagcaactaggtgggtcgcatttcgtaagcgattaatccgacaaatttgataccgtgctaagacgtaactcaacagaatcccaccgattgtcgatagtaaaaaggcaatcaagaggttcttgcgcatcgttgtcaaaccagatttaacggtttgtagtggtgctgccaccccaatcacgtaaatcagtttgttattgtaaaaaacgggtttgaagaccactaactgttcttgcttattgttattcacttggtgcgaatcacgacttaagctcagccgttgaatctggccattctttaaatgtttccaatattgtttcttgaccgaaactttaggatccggggtaggatacaccatctcgttttcggcgttaaagaaattaaacccaacgtgttgttgggaaaggatttgttgactatcaataatgaattgggtcgacaaggccgcttgagacccctgtttgaaagcttcacgttcaatcacatccgcgtaaccttctagttgatcccaggtgctctcataagcggtccttgtcgaatattgcgtaaacgcaatccccacaataataatggtcgtcataatgacgccgaaaaatgccaacatccattgataaataagcttcattcgcgcgctgcgtctgaatcatcaaatttataaccgacaccccaaacggtctgaatcacttgtggtcctactttttcaatcttttgacgtaacttcttgatatgcgcatcaactgttcgttcgtcaccgaagtattggtaatcccacacaagttctaataattgttcccgtgagaaaacttgacggggatttttagctaacgtcttcaataaatcgaattcttttggcgttaaatctaaaattggtttgtccaataaataagtctcacgcgttttagaactcaacttaaagtgtgttgtttgtacatcaaaatctgaattttcagccgcttgttgtaagttttcttcagctgcttcgacttgttcatcaatcaactcagcacggcgatgtaaggctttaatccgtgcaatcagtgtgattggactaaagggttttgtcacataatcatcagcaccgagttcaaggccaagcacttgatcactttcagaatcgcgcgccgtcaacataataattggtactgtcttcgacaactcgcggattttttgggcgacttgcattccgtctaaacccggtaaatttaaatcaagcgtgataatgtcccaactctctggatcgacactaaaggcttccactgcttcattgccgtcgtaagcgaaatgggcatcccaagcttctttttggaaaaacatactcatcatttctgatacggatttgttatcttctaccattaaaattttcattagaattccttctctttttacgttgctatgtctatattatacagtagataaaccaattacggatgaataatatatgaagaagtgatgaaaatcaaacgcatcacggttcccgtttgcatggtatcgctaagcatgatagcatgttaagcagatatcattatttaggaggccccattttgacttataaaggactagtatttttcgatcttgacggtacactttacaacgaacattctgaagtagatgcagctgttgcgattgcactccaccaattacgcgccaacaactacctaccaatcattgcgaccggtcgctcaccgcttgaaattcaagatgcacttgcaaaaaccggcatcgattcattcatttgtttaaatgggagcttcattcaatatgaaggtcaacctgtttataaaggcactattccaacgcccgtgattgaaaaaaccgtcgcaattgctaatgctgctgacgaagccatcgctttttataatgaagaagcaatccggattacggctgtaactcaacccggcaaagatgcctacaagtttgtcaacgcccccgtccccgaagttgatccagactattacttgaatcattcagtctacatgatgttgattctcacaaacgacaatgacaaggcctatacagaaacactaagtaccgacttaacattctaccgcaacacaccgaactcaattgatacggttgaaaaagattgttcaaaacaaaccggtattaaagaattgattcgctcacaaaacttaatgggcatcccaacttatgcgtttggcgatggtacaaacgacttaccaatgctcgacttcgtagactatcccaccgttatgggcaatggtattccggaagctaaagccaaggcaaaatacattacttctaagaatactgaaggtggcattattgaaggtttacgccactggggcttaatttaatcacttaactaatccgcgccataacggctcaatcactgtcatggcgctttttttatcttgacgcttctcagtagaccgattaaaattagaatcatatcacttaaaaaggagttactaatgacacaacattcactctttgccaaaaaacaaatcgacgtgaaccaatttaaaaatagtacactagaacgccatttaaccgcctttggtttaaccgccatgggggttggtgcagtcgtcggcgccggtatttttatcacaccagggattatcgccgctaaatatgctggacccggtgcgatgctgtcttacctgctcgctgcagtcgtctgcgcaatggctgccctttgttattcagaattcgcttctacaattcccttggccggtagtgcctacacatacgtctacaccgtcttcggtgaattaatcgcgtggattctaggttgggcacttatttccgaatatctcttcgcagtcgcctcagtggccgtcagttggtcagcctacttccaaaatctaattgctggctttggattacacttacctaccttcttatcgactgcatggacgcctggccaccctggtggtattaatttaattgccggtttaattacgttattgattgggttcttactatcaaatggcttacgcgaatcaacacggattaatacgattatggttggtgtgaaagtcgctgtcatcgtaattttccttggcgttgccattttctatgtgaaaccagccaacttcaaaccgttcttaccatttggtgctggtggcattctttctggggcagcattagcattttacgcctacatcggctttgatgccgtttcaaccgcatcagaagaagttgtcaatccgcaacgtgatatgccaatcgggattatcgcttcattattgattgcttcattattgtatgccgcagttgccaccgtcctcgttggcgtcgtgcactatacaaaactcaacgttggtgaccccgttgcttttgcgcttcaattgatgcatcaaaactgggttgctgggattgttgccctgggagcagttgccggtatgacaactgtcctactcgttatgacctacggcggaacacgtctgatcttcgccattagtcgcgatgggctattgccacccgtttttgccaaagtcagttcaaaaacacatgtgccagttgcgaatacatggattttcgccatcgtcacaagcatcgtcgcaatggtagtgccacttgataagattgctgaattggtcaacattggcacgttattcgcctttgcaactgtttctctcggtgtgatcttcctgcgcaagttaccattttataatgaattgccacaagggtttaaagtgccactattcccatggattcctttactttcatgcggcttatgcttactactcatgacccagttacaactaacaacttggattgtcttcttaatctggttggtgattggcctaacaatttacttcagttacggctaccgtcacagtcgccaataaaaaataggcgttaagcagttttcataatctgcttaacgcctatttctatgcaatctatcgtgaactatctacaaaaatgcatgaacatacgtgaaaatgaggtcatgttgccagcaagaatcgcgacaattggcactaatgcccacaaccagtacttattattcttccgctgttcaacctcagctttcaaccgtaaattctcattttccatcttaaggcgtgcaatttcaagttctaatttatctttgtcatccatgcaactcaccttccgtcctaatttattaccgccattataacagaatttttcaaaaatctcccacctatccactccaacaaaaaaagccctctaatcttgtggattagaggggctttaacgtgctttcataagcttgatggacgtacttgccaaagccctgtgtgaagtcaactgagatggttttaccatctggtgacacagtcgctggtaacgtttcttggtaggcacctaggttctgaatagtgcttaaactatcaaaggctgccttaacggctgggattgctacaagtttatcaaccccgtcaatcgccgtccctaacgcaccaaaaagtaaactaacccccggaatatcgcctggtgtaattggtaatagattagcgtcaatatcaacagttgcaccaccaaccacttttccttgtaactcagcaggtaaggcataaaccaagaccttcttatccgcgacgccaactgatgccagcccggtcccagaatacttcaatgctaaatcataactgccttgcgcgttcgatgtcatatctgttcctgtcaccgatgttagactcgcgttggctaaaatcgagatatcggctaagccagctctaggcgctacttcgctcgcttgcactcgattttgattcataacaaccacgcttgctatccccgcgccgctattcagtaataaaagagtcccactacacacatacaaacttcgtcgcaataaatgcttttggttcatcctactattcttttccatttcattgcacccctttcatttgtcctcaatgtatcgcttccaattatggttctcatattaatatgcttataataactatattaacattgtgaaataatcgcatttatccacatcttgaaagggtttcaattgctcaaaaatattattttttttatgctaattgtgtacaataaaaaaagagccacgacaaaaaattgacttttgtcgtagctcttttttgaaattctatatggctcattctactgcgctaataattgtccaattcttgatttaaattcagttaagaaacgcggcgtatcaacttgtacacaaaccgccgtccgcgttgctggatcatctaggcgggcattatccccaattgttcgtccacgtgacgggccttctatctcagtcttcaagttcaatgggaaagtcgtgactaagctaggatcgattgcaacagcgactgctaagggatcatgtaaggcacagccgtgcaaatggggagaagtgacttcataggctttgatatagtaatcaaccatatcggcataagctttggctgctggtgtaccgagtgcgcgccattctgccgtatcggtgcgtgtaaaaagtgtgcgcaacgtgacatcaaggcccaccatcgttaccggcaaaccactcttaaagagtaagtccgccgcttcagggtcttgactgatattagcttcagcaaatggagacacattaccacaaactgttaaggcgccacccataatcacgatttgaccaactttcttcaaagttggtaaatctttttgaatcgctaacgctaaattcgtcatcgggccagttgccacgatgctcaagtcagccccatacgcctgacaagcacgtaatataaaatcaacggctgattcagttgccatttccggatggggctctgtcagatgaatctcaccaacgccgtcttgaccatgaatttccgcactaattggtaagacgctaaaatcatgcgtcgtcgtcgaatgcccagcccctaaataaactggaatgtctggatgacctaataaatgtaaaatttgttgactattcacaacgcttcgttcagtcaaaacgttgccgtattctgaggtaatcccgattaaatcgacttctgatgatcccaatgcataagcaattgctaacgcatcatcaatcccagtatctaaatccaaaatcattttttgtgccacgccaagccctcctcaataatcatgcaaaataatgtacaccacaagtgtaccccattatcggggacgggtaaattaataacctaaggattaaactcaaaaaagacaagtagattattctactcgcccttttcgatgattcagtttagaccattgatttcatgatgcattaaaatcgtttgaccatctgactgagtcttattttggagccgatctaataacaacttagcagctgccaatccaatcgcttctgttggcggttgaatcgataggattggcaactgtccaaattgatgttcatcggcataatcatagtgaccaaatagtaaatcttggccaatccgaataccattttctgataaataagtgagcgcaccaaaggccatactatcattgctgacaaataaagctgtaataccttcggctaataatgcttgggcaccgcggtacccgctagtccgagaatagtcaccttcaaaaacatgtaactgtctgtctggataagctgccatcgtctgtttagcacctgccagtcgttcacgggcaacataatcatcctgattagcggcaatcatcccaatattctggtgtccgagatcaataatttgttgcatcacttgtgccacacttgcgcgatcatctaataaaatcgaatcaacattgcgtagctgatttgggttattaatcgtcacaaccggaatatcaagtgccgctagtcgttccattccttgccattcttcacctgctaagaaaacaattaaaccatcaatcgaatgcgccattaaataatcaattttttgatcaattaacgctggtttgtcactaaaaccactcaataataaactatacccttgttgctcaacgcgttgttctattccagaaacaacttccgcgccaaatcgacttgaaatactattcatcaataaaccaattgaaaaactttgattgttcttcaatcctttagcgataatattttgtttgtaatcgagttgctcaatggccgctgcaatcttggcttgattagctgctttaagctgttgcccattcagataccgtgaaacagttccgaccgagactccggccaattcagcgacttctctaacagatgacattcttattccccgcttatatcgataaagtgattttctccgctaaatcagcaaccataatagtcgctgcttgcgcacgtttcacctgattatcaatatccatgtaattaaaatcagcagcaggtagttcgaaagtaatgctcttttcttcacctggttggaaggcattcttttggaaagcttttaacagcttcattcgttgaataactgctccaccagttaatttgacaaataataaactactttcttgacctacaaactgtccgttattttttactttaacagttacaactagtttgtcaaccatttgcttaaccgctaattgtcgataatcaaattggtcgtaactaagtccgtaaccaaatggatataacggttggccaacctcatcatagtaatcatcttgtttagcagcatcgcgttgatagtagtaaaccggtagttgctgggtattgcgcgggtaagacacactcaacttaccacttggattattaagtcccactaaagtttcagcaattgcgcgaccaccttgttgaccaggaaaccaagcaatcaatacagcatctgcaagttcatttaccagtgttaaatcgtatggccggccttgcaccatgacacatgcaattggcttgcctagtgctttcaattgcttgagcagcacttcttgttggcccacagactaagtgatgcgacatcaacattttcaccagaatccatgttgatgccttttgaactcactgccccgttacttaggaaggccatatcaaaattacgtgcactggaaccacctaatacagggatgattaaatcggcatcgcgcgcaagctcaactactttggcaattgcctcttcttgatgaattgaattacgcacctcacagcctaatgcatacacgacttccgactcgggaaacatttcttgaatcgcttgataaattgtttgcgcttgacgcgctgaactttgtgctgctgtataatcccccaagagattatataattcatcagcattggggccaatcaccgcaatcttttgcggctgattccggattggtaaaagcccattgttcttaacaagcgtcatgctttcacgtgccacttgcagattcagcgcatcagatttttcaagcaaggccgtcaattgcgcattcggggcttgtacatagggttgttcaaacagacccaacaggaatttcaacgctagtactcggccagcagcattatctaaggcagcttcgtctactaggccattttcaatggcttgatcaagcgttaggaatgtctgatcccataaacttagatcgacacctgcatttaaggctgccgcggcagcttctggttgtgtttcaaagattcctgataaccgatcaagcgcaacaccatctgccatcacaatcccttgaaacccatttacatcccgtaaatcttgagtcaacaacggctgattgatatgacacggtaccccatccacatcgttataagcagccatcacacctgccgcattcttgacactactcaaaaggggttcatagacgtctgaaaattcacgttggccaattgtgacggtgcctgaattatggccacccaatgcttcaccttgcgcaatacagtgtttcaatacaacaccaatggcatcagtcgttcgcggtttagcaggttggtctaagaaagcaacatcactttgaattaaatccccttgaaaacccgccacaacggcttcactcattcgcgccgctaaaatgggatcttcaccaaaacattcttctgaacggccccaacgtggatctttgaccaaatcaagcgtcgaaacaagcgctaggttaacgcctttaagcgctagttcttgtgccatcagatgcgatgattgctgcattaaccgcgtattaaacatattgccgcggccaatattagttggatacgagattccttcaagcccttgatggccatgaggacattcttcaacaattaatgctggaatcccccagcgtgaatgcgccatgacatattcttgaactttattagcaactcgccaactatcctgagcacgaacgccattttcaaagttcacttttgaccatggatctgcgcgaaataaaccataaagtgcaccgacaccgccgccccattcaacatgcgccttgaatttttctgtaaacgttaatgactgagaatcttcgaaagtttcccatccataaagatgttgattcacttggccaatttttttcctgtgtactcattcgtgaaagtaaatcagtgacccgctcacgaatggtcagcgctgcgtcttgatatggatactgcatttcaaaaacctcattcctcagttaatactttgttacttgcaatgacaaatggtaagaataaaaagacatctaaaccaattaataagatggttaaaatcgctgctcggtaatcaccgccagttgccaagaaagattgaataacaggcggtgtaatccatggtgcagccgctaccgttttactaatcaaacctaagcttgttgaaaaataagcaatcactaaattgattgatggaatgatggcacatggaatcatgaaaattgggttcataacaactggtaacccgaacataacaggttctgtaatattgaagaaacaagttgttaaccctaatttagtaacttgccgttgatctttccgccgtgaagcccataaaatagcaatcactaacggtaaaatacagccgcccccaccaatcaagccgaacgcatttgtaaaaggttctgtaataatatttggaatcgcatgtcctgctgaaaaagccgccatattttcttgaatggcttgtagcaatggtgcttggcgaactggcgctaaaatgctagacccatgcatcccaaagacccataagaaatctgagaagaattgtaagaataacgttcccggtacagataatacaaacgattttagtggcgtttgaatcgcaaggtcgattaattgagggacattcaacccggttgtcacatttaaaataaatacaaaaatagcaaaaatcaaaacaaccaagacttctgggactaatgaattaaacgaggttgcaactgctggtggcacgccttctggcatcttgattcgtattttttcaaactttgtaaaacgaatgaataactccgtactaatcaatgccgctaacatcgctgttgcaagtcctgatgacgaggttaaactttgcaagaaaacgcctgttgcttccgccgttttcccatttgctaaagtgacggaactcgtcacaggcatcaaaataaacattgttgccaaacttaaaataccagcatgaactgcactaaatgcaggatcgttcactttcccagagcgaacataatgcgttgctaaattagcaccgatgttataacagaccacaattgataaaatactcatcgtcccattattcacaattgttgctagatcagctaatccgcttaaatcaacaatcttttgaacagcggcgtttgagaaaattagcgcatttaataaaaccataagcgaggccgccataacaagtggcattgtcacaatgaagctatcccgaattgcaattagatgccgctaattattgagtttagaaacaaacggcaacatcttttctgacagtttatctacgaatttcacagtcatttctccctttattgaatagaattgaaccggttcaatttcatataatagcacgcgattatcattctgacaatagcgcttacaaatataacctaaaaaagattgagtcctcctcatgaacaactcaatctttaaaccattgacaaaggccacctattcctaggtggccttctaattaatttcgcatattaaattcttacataatgtcaggtagccagtcactaattggctacgcacactagcatcgaatggctagtggagatgacgtgtgattcacgtcgcttttatttttgggttaattcaattatgtctaaattcttgtgtttctaaatatcttctcgtttaaacagcgtaagccgcctctttacactacttgtaactccatggttactccagttgattaaagtcttcaaataatacttgatactacagtgataagtgctgattaactttcctaagtataccatattttcagttcgaacacaaaatgaccataatctttctgaaaagaggctttctatttgaccaaaattgacctttgctgtaaaattcaatttatagactacagagtgattctactctggcttatataaggaggcaattcaatgttagtaccgacagttatcgaacaaacatctcgtggcgaacgtgcttacgatatttactctcgtttactaaaagaccggattatcatgttatctggtgaagtgaacgaccaaatggctaacacaatcattgcgcaattattattcttggacgcgcaagattcagataaggacatctcaatctacattaactcacctggtggttctgtgaccgcagggttagccatcatggatacgatgaacttcatcaagtctgatgtccaaacaatcgcaatggggatggctgcttctatggccagtgttttactttcagctgggacaaagggcaaacgttttgcattgcctaactcaactgtcttgattcaccaacctttaggtggtgcacaaggccaacaaactgaaattgaaatcgcagcgcgcgaaattttgaagactcggaaacgtttaaaccaaattttggcagacaactcaggccaaaccttcgaaaaattacaagctgacactgatcgtgataactacatgacagcgcaagaagcaaaagattacggtttgattgacgatattatggtcaaccaaccaaaatagagtagataataaaccggttctcttctgaggattagtaaaaaaaaagggctagatcaagttgatctagccctttttttataccaaatttgttatactggcagtatcttaaaggagggtcttccatggatattagtgtgattaaaagcgagaatgtgacaaccaccggcggtattacaattggtcagccagatgcaccattaacatcaattgaatttatcaacgccgcttgtccttattgccgcaagtggtttttaaaatccgaagaaacgatgactgaagcagtcaaagctggtcggctaaaacgtattatcaaaccttttggtaaggataaagaggatctacaactggggaatttagcccatacctatttaccttttgatcaacccgaaatagtgctgcaaacactatcattcttgtttacgcatcaaaaaacatggcgtaatgatctgacaccagatgaatttaaaaaatacatcgatcaaaatctcaaattaacgccacaagataatgcagaaaatttagccgcaattattgctgaagccgatcgtgccaatattaaattcgtcccgaccatcattattggtgaccatatctttgatgaatcaattgatatgactgacttaagtcaactactaaaataaaaaacaggtgccccccctcggggcacctgtttttgtatgtacgataaagggttccaaaaaattcaatttaccatcaaatcttttggaaccctttatccgtcattttatgaaaaacgtgcattatccatttgaatcgcattcaaatgatgttcaacttcattcatttcttgacgtaattcatgatacttatcgcttgagaaatcgagatagtttgtgcaagcaccaacccgttcgtagatttcttctttttgactttctgctttttcagttaaggtaacgtcaactcggcgttcatcgtctgatgcacgattccggcttacccaaccatcagcttctaagcgtttcaaaagcggtgttagtgtcccactatcaagttctaaatggtgccctaattctttcactgacatcttgccatgttcccacaatgcaagcattgcgatgaattgtggatatgttaatccgtaaggttttaataccttaccgtagaaatgattgtaagccttttgtgcgcggtaaatcgaaaaacagagttgttcatctaataatactggtttaaccatataattttcctccataaaatgtccttcagttattgtacttaattatattgtacaagtcaaatattgtacactaccgatttattttgccccttatccattcccctgttggtgggcttcggcaagttgattcaattttctgagccgatgattaatccccgacttcgaaattgccccactcggcattttttccccaagttccttcaacgtaatatctggaaattccaaacggagtagcgcaatctcacgcaacttcgccggtaaattatctaatccgacggtgtcgcgcaagtattcgatattttcgatttgttttgtagcagcatcaattgtcttattcatatttgcggtttcacaattgactaagcgattaaccgaattacgcatatcccgcacaatccgaatgtcctcaaacttcaacatcgcgttggtagcaccaatcacttgtagaaaatcagcaattttttcagcctctttcagataagtgatgtacccactccgtcggaaagtcgttttggcatttaagccaaaacgattcatcatgcgcgcaatatcttgattatgctcttcgtataatgaatagatctccagatggtaccggcttgtttcaggattattcactgagccaccggctagaaaagcgccccgcaaataagaacggacgcgctgatcttcattaatgacatcttctgacacctttgtatgaatggtaaaaccgtcctcctcaacaatatcaaggtcttttaaaacggtattggtatcatactttaagcgcacgatgtattgattattcttttttaacttcattttgcgacgtactagtaattcggattcaacttgataattttgtttcaataaactataaatccggcgagcaatcgccggattctcagtttgaacgtttaaaacaaattggtgattcatcaagctcagtgacccattcatccgaattaaagcggctaattccgctcgtgcatgttcaggatgcacttcaagttgcgtcagttctttcttcacttcacttgcatatgaggccacgattattcacctcgcttagctgtattgacctggaaagcaagattcataatttcactcgctactttttgtccattatggaacacaccatgatctttcaacttcaaaaagttatcggaaatcactcgacaacccaatcctcgtaagccatcaaagtcatgttcaaccggccagagaatttcgtcgtacttttgatgatccaaatagttttcagggacttgtgcggtattaaccaaaaccgtgtccacgaagttctgaccaagatgatcattcaacacgcggacgtgatcggcatcggtaaagtgttccgtttcccctttttgcgtcatgatattacaaatgtaaatcacttccgccttagtttgcttgactgccgcacctaagtttttaatcattagattcggtaaaatactggtaaacaaactgccgggtcctaagacaaccacatcggcagccaaaatcgcatcaaccacttgttgaacggcttcgggtgctgcagtatcatcttgatccgtttttgagacccaaacacgcttaatctgcttgcgtgctgcagtaatctcagattcccctgttaactgggtgccgtctttaaattcagcattcaacgacagcgcaacattggccgcaggataaatatgaccgtcaaccgccatcatttctgataaccgttgaacagcatcaaaaatacctgattccatttcagataacgccgcaataattaaattaccaatcgcatgccctgagaaaaaggcatcgtgtgatttaaagcggtattgaaaaatatcgagcgttaactgtggtaaatctgacaaggcgactaatacattccgaatatcaccaggtggtaccacgttaatgtaatcgcgaataacgccggatgaaccgccatcatcggcaaccgtgacaattgccgtagcatccgcattctgttcacggagactctttaagataacgggtagtccagtgccgccaccaatcacaacgacttttggtcgtcgccctttaatgacccggataatccgattagtagctgtcatgaccggttaaccgtttccttgcgtttcttcatatcccggtgggtcacgtcaaccggataatcgaacgataaatcatcagccaatcgttgggcaagcgctactgaacggtgttgcccgccggtacagccaatcgcaattgtcacacttgttttgccttccttgagataacctggcatgatgtcttttaacagcccactaaattgttcgtagaacttttcagtcgctggctgcgccattacatagtctctaaccggttggtctaaaccgtttaattccttaaatgctggcacatagtatgggttcggtaagaaacggacatccatgacgatatccgcatcaattggtaaaccgtatttaaacccaaatgacatcacttcaatatggaatgacggattatctgacgtcttgaagacatgaaaaatcttttctcttaattgtcgtggtgacatggttgaagtatctaccaccatctgtgctcgattgcgaatttcagttaacaggcgccgttctttttgaataccgtccattaaacgcccctccatcgctagtgggtgggaacggcgtgtttccttgtatcgcgaaaccaattcctcatctgatgcatccaagaagagaatcttagtcgtcacgaattgggtattatcaaggttagcaagcatttcaatgatctcatcgtaaaaagcacgtgagcgcaaatcaatcactaatgcaatcttagtcactttgccggactccttaaccaattcccaaaacttaggtagcaatgtcggtggcatattgtcgacacaaaaataacctagatcttcaaaactttgcatggcaacggttttcccggcaccactcatccctgtaatcactactaagttcaatgtatctgtcatcagaccaccccttaagttttcgcttttatcattgtaacattcctggtgtgtcattgaaagctgtcgaaactctcgacacgtgttatttaatgctattaaaccgagttcattcctaatgtctaggcatttgaaagagcttattttttccataaaaaaaattgcagaacaatcaaattgttccgcaatcattaaatttagagactataaacgtcttgcaaatgcgatgatgatggcattaatcccaaagaaagcaaagtaaaaaccaactagggtcaccatcgttacggcagtcaccactggatccattaacaataagatcccaacgattacgcctaagatattcagaatcatcgaaacgatgtataggcctgtgttaaattgcttgagatggccgacattcaataatgccacaattgaatcgaacaagaaccagaatgcaaagatataacctaaagcagccactccagctggaatattcaagataaacaaaattcccaaaatgacatcgacaatggcatcgaccaacattaacgttgcgcgcatccctgtctcttgacgtaaccgactatatgcactgattttggcaattccccgaataatcgccgcaatcgcaatcacgattaccaaaccagataatgtcttacctggttgattaaacaagcaatatgcaacgattaagaaaataatccccgtcataaattctgaccaatcaaagtgccattcattttttctaaacattcccaatcacctctcgttgttaatacctttatgatactttttttacggacaatctacaactaaatttgacaaaacaaaaagtgggcggttaagacagcaatcattctgtcttaaccgcccgctttttaaacacattctatcaaccatcttctggttaaacctgagcggcaattgtgcgtgctgtatcgcgttctaaaacaggttttaaatattggcctgtatagctttcactgacgttggcaatttcttctggcgtaccggtcgcgacaattgtcccgcctttatcgccgccttctggtcctaagtcaatgatgtgatcggcagtcttaataacatctaagttatgttcaatcactaagatcgtgttaccttcttcaactaaccgttccaaaacgcccaacaagcgcttgatatcgtcggtatgcaagccagtcgttggttcatcgaggatgtataaattcttacccgttgattgtttctgtaattcagaggccaacttcatccgttgggcttctccacccgataaggttgtggcagactggcccaatgtgacgtagcctaagccgacatccacaatcgtttgtaacttgcgggcaatcttgggaatgtttgcgaagaagactgtggcttcaccgaccgtcatgtctaagatttcggcaatgttcttgcccttatagacgacttccaaggtttctgaattatagcgactgccatgacagacttcacacggcacatacacgtctggtaagaaattcatttcaatcttgataatgccgtcacccttgcaggcttcacagcggccacctttaacgttaaaactaaaacggccttttttataaccgcgtagtttggcttcattggtttgcgcaaacaaatcacgaatattgtcaaagacgccggtgtacgttgctggattactccgcggtgtccgaccaattggactttgatcaatattaatcagtttttcaagattctgataacctgtaattgttttatattgacctggttttgctgagttacggttcatcttttgtgccaaagcttttttcaaaatcgtattgactaaggttgacttgcctgaacctgaaacaccagtaaccgcgacaaattcacctaatgggaaatcaaccgtcagattcttcaagttattttcagccgcaccggtcacgcgaatcttcttgccattgccttgacgccgttctagcggtactggaatatattcggaaccggctaaataacggcccgtcaatgatttcggattatgttcgacttcagttggggtcccagcggccatcacttcaccaccgagttcaccagcgccgggcccgatatcgatcaggtaatcagccgcgcgcattgtatcttcatcatgttcaacaacaattaatgtattgcctaagtcgcgcatcttcttcagtgacccgatcaaacggtcattatcacgttgatgcaaaccaattgacggttcatcgaggatgtagagcacgccagataagttcgaaccaatttgcgtggctaaacgaatccgttgggcttccccaccagaaagggtcccggctgaccgactgagcgttaaataatccagaccgacgttaatcaagaaagttaaccgatcatgcacttctttcaagattggtttggcaaccacactgtctttttcagaaagttcaagttgatcgaagaatggtaaagcttctttgatggcgttgtctgaaacggcagcgatatcttggccgcccactttaacagccaaagcttgtcgatttaaacgagcaccatgacaggtttgacacgttaattcagtcatatacgtccgcatttgcgtccgtgtgaaatcactattggtttcacgataacggcggtcaatattggctaatacaccttcaaacggcacgtccacatcacgcacaccaccgaaatcattttcataatggaagtggaagttcttaccctgagaaccatttaagataatgtctttttggcgtggtgttaatttgctaaatggtcgatccatgtcaattttaaatgacttgcaagcttgttcgagcatctgtggataatattgagagctaattggattccaaggcgcaatggctccttcgcgcaatgtcttgctggtatcaggaatcactaaatccatatcgacttctagcttaacccctaaaccatcacagtctgggcaggccccaaacggtgcgttgaacgagaacaagcggggttctaacgcgcccaccgtaaagccacagattgggcaggcatagtgttctgagaaaagtagttgttcgccaccgatgatatcggcagtcgcatacccttctgataagcgcagagccgcttcgaacgagtcaaataaacgggaccggacaccgtctttgacgacgattcgatccaccacgatattaatgtcgtgttttttattcttatccaattcgatatcggcactaacgtccatgacttcactatcgacttgaacacggacatagccttctcgttggattttttcaaatacttttttatgttgcccttttttgccacgaataatcggtgacatcacctggagtttcgtcttctcaggtaacgctaagacacgatcaaccatctgttcaacggattgactactaatttcagtcccatcgttcggacagattggatgaccgacccgcgcccataaaagccggagataatcattaatttccgtgactgtcccgactgtcgaacgcggatttttagacgttgttttttggtcgatcgaaatcgcaggactgagcccatcaattgaatcaacatctggtttatccatctggcctaagaattggcgcgcataagccgataaactctcgacgtagcgccgttgtccttcggcatataatgtatcaaacgctaacgaactcttcccagagcccgacaatcccgtcacaaccaccagtttatcccgtggaattgtaacatcaatatcttttaaattatgcgctcttgcgccatgaatgacgatcttatcatttgccatgctttacctcttttaatcaatttcactcttaatctctaagatggtatcccgtaacgtagctgcctgttcgaagtccagtttcttggccgcattccgcatttgttcagataaccgttctaccatttctagtttttcagctttcgacatactatcgaaatcaatctcgttggtcatcttgacttcttcagggtgttcgactgattgaacaaccgaaatcgcatcccgaactggtttgataatcgtcttcggcgtcatgtgatgtgcttcgttgtaggcttcttgaatcgaacgccgccgcttggtttcatccattgcattgcgcatcgaatcggtaatcttatcggcatacaaaaggacttgcccgttttgattccgagaagcacggccgattgtttgaatcaatgagcgctcgctccgcaagaaaccttctttatcggcatccaaaatcgccactaacgagacttcagggacgtcaatcccttcccgcaacaagttaatcccaattaagacgtcaaacttaccaagccgtaaatcacggataatttccgttcgttccaaagtcttgatatcactatgcaagtaacggactttaatccccagttctttgagatagtcagttaaatcttccgccatcttcttggttaacgttgtaataaagacgcgttcgttcttttcaatccgatcattaatttcgccgaccaaatcatcaatctggcccataatcggccggacctcaatattcggatctaacaagccagttggtcgaataatctgatcgacctgaatatcggtttgttcagcttcataagggcctggagtcgcagaaacgtacatgatttcattgacgtgttcttcgaattcaggtagcgtcaaaggccgattatcaagcgcacttggtaatcggaacccataatcgattaacatttgcttccgggcacgatccccgttatacatcccgcgaatttgcggcatcgttacatgggattcatcaatcatcatgattgaatctttcgggaagaaatcgagcaacgtataaggtggttcccccgccgcacgatcctccatgtgccgtgaatagttttcgatccccgagcaatagcccatttcttgcatcatctcaagatcgtaattcgttcgttgttccaaacgttgggcttccaacaacttgccgtccgccttcaattccgttagtcggccttctaattcagccttgatactcttaatggctttttccatcttttcttcactagtcatgaaatgcgttgctgggaaaatcgcaacatgttcgcgttcaccaatgacttcaccggttagcgcgtcaacttcaacgattcgatcaatctcatcgccgaagaattcaacccgcaacgcatgatcatcacgtgaagccgggaaaatctcgaccacgtcaccacggacgcggaaacggccccgttggaaatcaatgtcgttccgttcaaattgaatatccaccaattgacgcaataagtcattgcgctcaatctccatccctggccgtaacgaaaggacgtgatcttgatattcattcggatcacctaagccgaaaatacatgaaaccgacgcaaccacaatcacatcgttgcgttccaacagcgcactggttgctgaatgccgtagtttgtcgatttcgtcgttaatactcgaatctttttcgatgtaggtatcacttgaaggcacataagcttctggttggtaataatcgtagtaactgacaaaatattctaccgcgttattcgggaaaaattgcttaaactcggcatagagctggcctgccaaagtcttattatgcgaaatgatcaatgttggtttgtttaaattcttgatgacgttcgacatcgtaaaggtcttcccggtcccagtcgcccccatcaagacttgtgcttttgcacccgcctcgaagttcttagttaacgtttcaattgccgctggttggtccccagctggttcatagggcgccactaaatcaaattggttatcattctgtcgttcaatcatcaaaagcctccattaccatttgctagcgataaaagaagacgccgggtagaagttgccctccaccataacgtctacttaccgattttataaagaataatattccttgtcctttaagtcattcactattctaccacaccgaacatactttcgccagagtgctgattaaagagtgcgtcattaagcggttatcctttgaggattagcctaaccagacggattagcgacgcagtcgatgatgcggctggtgtagctaaccggaaaaggatgcttaatgaaagcacgtttcaactaaagtgtggaaacgtgctgttgtcagtagattcctgcgctttgctacacttgtcaaatcgccgcttatagcgtcaattcgccaagttaggcaaatgctctgaatctgagcgactgacaacagcactctattccgctagcgtctgtctcactaattgggttagcttccctcgatctgcgaagtcttcactcagtaaatctggcaagatttcttggatgaaataacgggcgcatgcgagattttggtattgcataatcgtttttaaactttccgcaaaaatttctagaaaagcattctcaggattacctttttcaatttcaccaaaagactcgtagagtaaatcaatcttatcggcaacggctaataattgcccttccaaagtttcatcttttccttcactcaaacgacgttgataccgttcttgtaagaaatctggaatttcatttttaatgaagttagcggttaatgaactttcgacattggccaacatcgtccgcaattcatgcgttgcgtatttgaccggcgtcttaatatcgccgataaaccgttccgtataatcgtggttcagtgcgcgttcgtacagcacttgccaattaatcgtttgcccattttcttcttcaatatcgcctaataattgcgcaatttctgctactttaaaggagtgcgctgcaacggaatgttcttgatatttaaacaatcctggtgcgcgatttagtgtctccaaattattcaaaccttgcaaatattgatgcatacccataccaaactacctcccttttcttacaaaaatagaccgactaacgcagtagtccgtctatttactgttctttattataggtaagttatcctgaaatgtaaaacagaagccctatctattttacaagttcatgaattgctttttcgaagtttgctaacttcaaatcagctgttgcggcatcatcagcggatgtccccacatagaatttcacttttggttcagtcccacttgggcgaatcgcaatccaagtgccatcttctaagtgatatttcagaacattagatgttggtaaattgatgggttcagtatgaccgtccgcaaaagtttctgtttgtgtttggaagtcttctgctgaagcgactttgatgccggcaaattcaactgggctttcttcacgacatttaaccatcaagtcagccatttgttgtgggccattgaccccttcgaaatcaactgcagtcgtttgttcagcgaagtagccgtattccgcatataattcttgaatgccatcatacaaagtcttaccgtttgacttgtaataagctgcaacttccgctaataagaccaatgtttgaatcgcatctttatcgcgaacgaatggtttcactaagtagccatagctttcttcgaaaccaaacatgaaggtgttttcgtctgtgtcttcaaagtgttgaatttgttcagcgataaatttgaagccggttaagacatcaatcatcttcacattgtagctcgctgcaatcttcgttgccaattctgttgacacgattgacttaacagccgctgcattggctggtaatgtgccagcatctttactagcttgtaaaatataacgtaataaaacagaagcgatttggttcccagtcatcaattggtaactcccgtctggttgacgcacagcggcgcccaaacggtcagcatctggatcagtcgcaatcaacaagtcagcttgttgtgctttcccgagctcaatcgccatatcgaatgtttgtgggaattctggattagggaatggtgtcgttgcaaattctggatcagcaactgcttgttcagcgaccattgtaaattgttcaaagcctgcttgacgcaatgcgcgttcaccaagtactttcccggtcccatgaagtggggtgtaaatcaatgacatggtcttgccgactgtgtcgaccaattcttgattaatcgtgacttgcttaacttcagctaagtaagcttgatccacattttcgccaattaaagtcattaagccggcttcgcgcaatgtgctttcatcagccacttcaatcgcaaataaatcggttactttgcgaatataacttgtgattaaatcggattccttaggtggcatttgcgcgccgtctttgccataaatcttgtaaccattgtattgtttaggattatgacttgctgtaatcatgataccggcataggtatgtaagtgccgtacggtaaatgataattcaggtgttgggcgtaaggcatcaaaaacaaacgttgggatttgatgttgacctaagacccgcgctgcttcgtgcgcaaatgtttcagattgataacgtgaatcaaaactgatagccacaccgcgttttttagtcgcttctggtaatgttttcatgaattgagcgaggccttctgtggcttgacgcaccgtataaatgttcatgcagttgatcccagggcctaaaataccgcgcatcccagctgtcccaaattccattggaacgctaaatgctttttctaatgcatcatggtcgtttgccatttcgttaagtgctttttttaaaggtaaatccatttctgtttgattattccaaattgcataattatcttgccagctcattgtgtaacccccgcattttagtctaaaagctagttctaagtataccataatcaaccgctttcctaaagcatcggttgtacggtaatgcgcaccaagctaattgtctgggtcgattatttaataatgcttgtccttctaaaaattaaaatttttcccaaaataaaaaaacggccgactaaaatttagtcgaccgctggaaatgtgcgtcataagccacatttttaggttaatcctcaaaaataaaatcgtttcgaacgcactctaatcgtgcttcctcgaactgtcttttctggttaaccctgaatgtcaaacgattgctaccgcaatccttcgccattctgtgttaatcctcggaagctaaccggctgccgtcgcactctagatactttgtaagtatttaaatacttcttggcctgctatgccgccgtcgccaactgctgttgtaatttgacgaagatctttttcacgaacgtcaccaattgcgtagatacctggaacactggttgccatgtggtcatccgttttaatccaaccggcatccgttagaatccctagatcaccaaaggcactagtcattggttcaatccctacatagatgaagaccccacttgcagcaacttctttggtttcaccagttaccttatcaatgtaagtgacaccggttaccttcttgtcgtcaccttcaatagttgtcacttgtgcattccagatgaagtccatcttgtcgttagcaaatgcacgatcttgtaaaatcttttgagcgcgtagttcatcacgacgatgaatgactgtcaccttgctggctaattgcgtcaagtagaggccttcttcaatcgctgaatcgcccccaccaatgaccacgacttctttattcttaaagaaggcaccatcacagaccgcacagtatgagacaccacgaccgccgaattcatcttcaccggggatcccaatcttcttgtgttctgaacccgttgcaatgatgattgaacgcgcttcgaaatcgccttcgtcagtgtgcacaatcttcatctcgccttgcagttcaatcgagttgaccgtaccatagccgtattcagcaccaaattgagtggcgctggcatacatcttttcgcctagttcaggaccaaggattgatttaaagccgggataattttcgacctctgctgtattattcatttggcccccgtaaattccgcggtccaacatcaatacagataaattcgcacgtgaggcgtataaagcagcggtcatcccaccaggtcctgcgccaatcacaattacatcataacttttaaccatgtctattatccccttacttttaaaaagtgctcgttcttcatagaatgtatcttacccgttatgtaaaaaaaagtctaccaaactgttttaccagtttgatggacttgttggtttcaattcttgtaataattcagtggcttcggcatcgaaatccgaatcgtcactctgtaaataagcagtcgctaattcatagctcgcctgcgtctgatttaaaaaggcatacgccgttgctaaaaaatattgtaactcaggatgactctgatagttggcggttggaatttcttccagaacggtcgccgcaccatgatagtcgccaaccgattccaaacaaatcgctaattggcacaccacaaagatgtaatcatctttggtcttagccagcgactttgcccgttgtaaacacgttaatgcgcgcgtgtactgaaatcgttcaaacgcctgcatccctctgtcaaaataaaactcacaagttggtcttacagataccaaatcgcccataaagtaatcggttctcctttagcctttttctcaacgctaatcatcataacacactctgatgatgggtgcgatacccattcaaaatgatgccgctttattcgttaaaaagttttagacttcatcaaaatcgatttcaggtttacctgaacgccgcattaaatacgcaatttcagtcttaatatcacaatcttcatacaatacattatagatggcccgtgtgattggcatatcaacagaacgttgttgagccaattcataggctgctttacatgttgcgaccccttcgacgaccatccccatattggctagcacatcagctaatttttgacctttaccaagtgcatttcccgcacgccagtttctcgagtgaacactggtcccagtcacgattaaatccccaacaccggataatccgataaaggttaatgggttagcccccatggcaacgcctaagcgggaaatttcagctaagccacgcgtcatcaaggcggccttcgtattatctccataaccaagcccgtttaaagcgcccgcgccaagtgcaatgacgtttttcaaagcagctcccatctcaacaccaaccacatcagggttggtatataagcggaaataatcattcatgaaaatctcttggatccattgggcttgaatcaagtcacttgatgcggcagttaaggtagtaatatctttttgtgcgacatcttcagcatgactaggacccgataaaacaacaatcccattgcggttggtttctggaatggcttctgtcaagacttctgaaatccgtttgtgcgtgccttgttcaagcccttttgaagccgtcacaatcacgggtttcacttttttcgcaatcatcacaggaacaatctgttccgccaccgcacgaatcgcttgtgttggaattacaaacaagacaacgtcaacttggtcaagtgcaacgttaagatcaatcgttgcgtgtaactggggatcaattttaaaatctggtaaataatgtgtattggtatgctgttcatttatttcagcgacttttttaggatcattgccccacaactcaacttggtggccattttccactaataagtttgctaagatggtcccccatgaaccggcccctaaaactgcaatttttactgtcatctgataattctccttttaaacaaatccctatttctgttcttttgcttgattgccggttaaataatccggtaactgactgtgcttacgccgccaaatccaaagaccaattgcaccaaagaataagacgagtgagacaatctgcgatacccgcaatggaccgatgaataaactatcagtccgcatgccttcaatgaagaaccggccaaacgaataccaaattaaatagctaaataagatttcgccttgtttaaaccaaccagttcgatggcgaatgctcatgatgataataaaccctaatacattccatgctgattcatataagaatgtcggctgacgatacgcaccatcaattaacatctgttggatcacccaatcaggtaagtgtaacgattggagaaagtgcaatgttgttggcgccccataggcttcttggttcataaagttgccccaacgtccgattgcttgtgcgatcatcacggttggtgccgcaatatccaacactaaccaaggcgatagtgcatgacgccgacaatagataatgaacacaatggcagctgcaatcagtccaccgtaaatcgcgatcccgccgtgccaaatctgaataatttcgccgggattggcttggtaatacgaccattcaaaaacgacgtaatacagtcgggccccaattaaggcaaatggtaatgcccataaaattaaatttaaaatatcatcttcactgacattgcgccgtctagcttcctgtaatgccaatccaacggctaaaacgaccccagttgcgataatcacaccataccagtggatctccaatgcgcccaatcgtaatgcaatcggatttaatgcgcctaatagtagattcaaattattcgctccttttgtaaatgtgctttcatcaaaacgtacttttcaagctaactttctgcgcttagcgtcgtgaagcaaacaatcgactgcgtcgcttatcgcttcactgtgctaatgcgcaaaagttggacaagcttgaatgcactcttatccgaaacgtgctccgtaagccatatccttccggttacccctgaatgtcaaacgattactgacgcaatccttcgccattctgtgttaaacctcaggatatacccggcttactgcgcactctaaaaaagactagtttgcatactgtctttctaacagtatagctcaaactagtcattaggcctaccatatttaacgaacttttctgacttttaactattcttcttcatctgaattggcttcaattaacttgcctagattggcttcgaaggtcttcgttgcatcatagcccattgatttagcccggaagttcattgccgccacttcaataatgatggccaagttccgcccgactttaacgggcacggtaatcttcggtacagggacgtcgaaaatcatttgttcttcggtatctgaacctaagcgatcgtatttcttatcctgtgaccaattttgcaagtggacaattaacgaaattgacgtttcagcccgcaccgcaccagcaccaaagaggttcatcacatcaataatcccgatgccccgaatttcaagtaagtgacgcaaaattgcaggtgcttcaccgaccacggtttgttcatcttgttgataaacgtcgacccgatcatcagcaatcaaccgatgaccccgtttgactaattccaatgccgtttcgctcttcccaacacctgaatcgccagtaattaaaacacctaaaccgtaaatatcgactaacacaccatgcattgagcgccgttcagctagcttcccttccaaataatcggttactaaactcgacaaacgcgttgtcgataaattcgaccccaacacgggaatccccgcttcttcagctgctttaagcatttccattggcggttctaattggcgcgagaccaagaaacagggcgtatcttcagaagccatccgacgcataatcattaaccgttcttctggtgtcatattttgcgtaaatgaaacttccgtccgtccaaataattgcacccgctcgtaagggtagtaattaaagtagcccgttaattcgagtcctggacgggaaatatcactcaccgtcactgctttattttttaaatgtgcttcaccggcataaacttgtaattttaaatcggtgactagtttttgaattgaaacactatcagccatgagttacccgtccttcattttcacttatatcctctatcatattgcttttagggtgatttttcaactttaatgtaggcgttttcttatctaaacaaaaaaaacgggaccaatatcaatcttaattgtgaagtgaacccccgatattggaccaaaatccaatatcgggggtttttatattggtagattgcaaattaataataaaaaaataatagagagaaaaattccatccatcaaagaatggaacggtgacaataattagcttgaatatcttttcgtttattatattatgctcatttattttattataaagtattcacaaattttaaagaatgagtaactagaccacaatcccagcctattcccaatatttttgctatgcttagagtaattgaaggaggcttttttatgtatcgttatgccgttatttataatccccactctgggcacaacaatggtgagtcggttggtcagaaaattgagcaggcactcatcaagaatcaacacaaggtcgaactgatgccgacggaagggccgaaagatgcaacgcggttagctaaaaaagcggcgcgggcaggctttgatgtggtggtcgctgtcggcggggatgggaccattaatgaagtcgttagtggtcttgcgacgttagatcagccgccttatttaggcattgtacctgctgggaccgtgaataatttggcgcggatgttacaaatcccgttggacattgatcaagcgattgaaaatctgcagcaggttcatctgcgcccactcgacgtcggccaagtgaacgatgattacttgattagtacaatgacattgggcattttggcggacgccgcgttgaacgtgactcagagtgaaaaacaaaaatgggggccgctagcttttttaagcaaaggcatccatgcattagcggagcatcagcattatccgctaacgattgaaacgcctgatcggcactggcaaaaagacacgcaattcttgctggtgaccctcacgaattccgttggtggatttaccaacttcaatcccgaagcgcaacccgatgatggttatttccatgtcttcgttgcgccgaaaatgtcgctagcacggtcagtgatgtttctcccttatttcttaacgggtaattttaaaaagattcccgggatgacttactttaaagcaaatgaaatcagcatcacagtcgacaatcaacaaagtgcacaaacccgcattgatggtgatccaagtgccaagtcaccattgaagatgcgactcttagaacataagttgcaagtgattacgcctaatccggatttataagaccaggataggttagagtcatcggtaaaacaaaaaagaattcaaaattttctaacgaaaattctgaattcttttttttaattattgcgttaattcagcttgtttggccgcaacgcgttcactaatcttcaagaatggccagtagattagaacgccgaggattaaagtgaagccttgaatcacaggggcgcgccaatcgccgccggttgctaaatatgagttgagtaatggtggtgtggtccaaggtaccatgacgaccactcgattcatccagccaattgcggtgaagaagtaggcaatactgatgccaagtcctggcattaggacaaatggaatgatgagcgcaaagttgaagacaattgaataaccgaaaataacaggttcgttaatgttaaataaacttgggacgaatgatagctttgtaatatcacgactagcgcgtgattttgagaagagcaaggtcgcaatcaataaacaaatagtactaccggtaccaccaagcatcccaaatgtatcgcggaaaacgttgttgatgatataagggatgtgttgactagctgcgtaagctgccatatttttgttcatgttgattagtaagactggatccaataaagtaccgttaatgacagcttgatggatcccaaatgagaagaggagattaccagtcccgtaaatcagaaggagacccggtaaacttgtattaatgcgccgaagtggttcttgaatcacatttgtaattaaagtgatgagatcagtgtggaaaccagccgttaaaatcgcagcaagtgccgcaaatagactcatggtaatgagagctggaatcattgtgttgaaagaaccagcaacagctgatgggaccgcatcactcaagttaatttgtaactttttaagttttgagagggtcataaagagttctgttgtgactaaaccaataataatgccggcaaacatcccggttgttcccacgttttggaaagttaagacgccagaaacttcgacggctttcttggcagctagtggtgtgaccggaacagtattaggcatcatgatgattaaagtccctagtgccatgacagccgcggaaattttgttgacgtaattcttattacgtgctaaacagtagccgattgtgggtgcgagtaatagcccagcaacgttcaaagtcccattggtaatgtaagtgccgaagtattgaaagttggttagcatttggccgtggaggacccaggggaatacaacgttattcacgagcaccccaattccggcgaggatgaatagtggcataataatcgcgaaggcatcacgtaatgaacgcaaatgcacttgattcccgattttaaaggcgatatttgtaaactgatcaataaatctttgtcgccgacttccttgtttaagcatagaaaacactccttttagcgcactttttttagtctaattgttcaccgttagattgaatgactttttgcagccaataaaaactagccttcggaattctagcaaggtctttgaggtcgtgattggttcgattgacataaacgacgccatagcgtttattcatatcaccttttgaacttgggatgtcgattaacccccaaccaagatagcccacaacgtgagcgccgtcttcatcaactgcgtctttcaaagcctggatatggtcgcggtgataggcaatccgttcgtcatcttgaatcatttcatgattcagcgattcttcgcgaatgccaatcccgttttcgatggggaagatggggaggccagtttcattcgaaagttttgttaagacgtttctaaaaccgagggcatcaatctgccagccccattcgctactttctaaataaggattagggacactcgcatcgcgcatgtaataattgggtggtgtgttgggggttaattttgtgtgatcgagtgcgacagtgtagtagtaactgaacgctaagaagtcgttgtgatgacttgcaatgagcgctaaatcaccaggctgaatactgctcattaagtcatgattttgcatatattgcagtacttcggctgaatagtgaccttttgtaaaggcgtcaacgaaatgttggttgataaattctgatgcttttctagcagcaaagatatcttgggaatgactggttgcaggatagaattcttgataggctaacatcccaccaatttggtcattagggtagtgggcgtgtaagtaattggcgatttcagcatgcgcaaccattgtattattagcgatcgtataaagggttaataagtcgcgctctccgttgataaagccagtattatcaaagccaggttcaaagaaaaaaccattttgttcattaaagcttagccaatatttgacttgtccaccataacggtcaatgacagccttagcgaacttagtgaatgcttgtgtgacataccgacttgagaaaccattatatttttcagctaatgagtgaggctttttttgttgcattgatttgaagttgttgacaaaaattcacatcaatagtttaatggtttaaacttatgaaccattaaaataaaaccggagattaatgtatggatgaaatgaaggttattaaacagagctttgctgagctgagcccgtttttgacggtgcttggggatgagaagcggcagagtattattttagaattgatggctgataaagcttgtgatggcttacaggtcacggatttaatggcggcgtcggacttgtcgcgcccggcagtgtcgcatcatttgaaagtgttgaaggaagccaacttggtcgactttagacgcgaaggtacgaagaactattattacttgcaacacgaactgggcgaaatcaatcaactaaaaacactgctggatcagattacggcagtcatcgaaaaacaacagtaaaaggagtttttaaaatgcaaaccatcttaggtagtagcggtcagattggccaagagttagccaaggcacttcataaggacttcacaacggacattcgactggtcagtcggaatccaaaaaaagtgaacgcgaacgatcaactatttccagcaaacttgctcgacgccgcccaaactgatcgtacggttgcaggcagtgaaattgtttattttaccgctggcttaccgatgaattcagacatgtgggaagcacaatttcacattatgatgactaacgtgattaacgcgtgcgtcgcgcacaaggccaagctcgtctttttcgataatacctatatgtatgcgaaaaatagcacgctccagacagaagcgagtccttttgaacccgttggccgcaaagcggttgtccgagcggagatcgcacagttgttacttgataagatggcaactggcgcaattgaagcggtcatttgtcgtgcacctgaattttatggcccaggcaagacgcaaagcattacgaacacaatggtctttaacaatatcaaggcgggcaaaaaggtgcgcgtgccattgaatgatcaagcggttcggacattaatttggacgccagatgctagtcgtgcgatggcgttgattggcaatacgctggatgcatttggtcaaacgtggcacctcccttgtgatgacggtaaaacatacgccgaaaccatcgcgctagcaggcaccttaacgcatcaaccaatcgactataccgttttaaaaatgtggcagttcaacatcggtagctggttcagcaaaccgctaaaggaattaaaagaactcctacctagatatgaagtagataatctgttcagttcagacaagtttaagaaacggttcccagaatttaaggtgacgacgattgaagaaggggttcaggagattctttaaaaagtcagcctttcgctcgatagactaaccattgttcaatattatataatcgctttaaagtagcgatgttagtcaatcagataaggagcgtggcatgatgaagaaaccttttaataagcaacaagtgaatggtgaaccaaatcgggaatttgattccttctttgcggaagtcttaaagaagttgccgcaacaatcggcagctgtgattgcgaagtcttttaaccagtccaaagcattggcggaaaagacgatggcgaagagtcggacacagtttgatggggtctttgaagacttcctagtcggtgtggatgatcagatgcgtaaaaaggcacacaatatcattcacgcagcatcactaacagcagcgattattggctgttcaccaattccattttccgatgcgttcttgttggtgccggttcaattaacgatgatggcgcgtttgcataaactattcggtcaatcttggtcggctagtttgggcaagagcctgtcgaaagaattggtactcgttggcctaggtcggagtgcagtcggtaacattctaaaactggtaccggtcgttggaacggtcaccggagccgcggtcaatgcgaccgttgcgatgtcgattaccgaagcgctcggctggttaacagtcaagatgttgaacgacggcgaggacatcttcaatgatgttgtttcatttaaaaatcaattcagaacgctatttggattgttacggcgtaagtagttatttttcaattgacagaataagaacgaaatgatttaataaacccacatcactaatttttaggaggctaaccagatgcccaaagtactaattgtccacacgaatgttacgcgttatcaaggaaccaccgatccgaccggattatggctgggggaatccgcagagttcgttgatgaattgcaaaaagcggggattgattacgattttgtcagccctaaaggcggctttgtcccgcttgatccacgggggatgaagtacacggatgaatcaattctgaccatctatgaacaaccggattacgtgcaacgggggttagtcgcaacgctgaagccaagcgatatcaatccagctgactacgctgcgatttactatacgggcggccatggcgtgatgtgggattttcctgataatccagaattacaaacaattgcccgggaaatttataatcacggtggctatcttgcgtccgtttgtcacgggatcgcgggtttactacgcattaaaaatgatgacggtcagtatctgattgctggtaaaaaagtgactgggtttaccactgcagaagaaattattgcgggcaagaaaaaagtggtgctatttttaaaccaagaagtggcaactcaaaacggcgcgcaatttgtgcaaaaacggttttacaaaccatttgctgtccaggatggtcagttgattacggggcaaaacccgttttctgtacgagaagtgacgaagcgcttgattccggccctacaaaataacggttaggcattctttgaattctatgctaatcttatagaatgtagaaaagttaggagtcagaagatgagtgaaaaacaaacaccaaaattaacgcaaaaagaaaaaatgcaagcactaattgatcagaaaaaaggcggcggcagatcaaaacagaccgacgttgctaaaaatgatcggacaaagatgcgcaaagggccaaagatttttaacgaaatccactggtaaagagtgcgtttggttgcggttagcaactgagcattaagctaaaatccgcagtaatccaggttttaggagtactgcggattttagcttaagcggaagttgttgcaaccaaaaagcacgtttcaaacaaagtgcgtttgaaacggtttggttctgagcattaacctaaaaataagcactatggcggtccttgccatagtgcttattttgtagttaagcgcaggagccagtttcaaaaagcacgtttttgggctagggcaattttgcgctagccctttttgtgttaacgcgctatgctagaagcaacttattttaaatcgaatggagtctttgtatgtcatctttaatcgaacaaatgcaacaccatgtttcagttcgtgatttcgagccaacacccctcagcacgacagtgaaacaacaactcattgcagcagctcaaagtgggtcttcttcgaatttcgttcagccattttcaatcattgaagtgaccgatcccgtaattcgtgatgaaatcgcaacgatttctcaaagtgcggcgtatgttaaacagacggggacgttctatgtttttgtcgcggacttataccgacaagccacactcttagaaaaagcgggccagtcagtagctggcattcaaaatatggaagccttattagtcgcaacggtcgacacagccattgcagcagaggacatggcagtcgctgccgaatcgttagacttaggcatctgttatatcggtgggattcgcaatgacattgcgcgtgtcgctgaactactcgagttgcccgcctataccgtcccactatttgggttaacggtcgggattccgaagactaaaaatcaggttaaaccacgattgccgcaagttaatcaagtcgctcaaaatcaatatgatgtgcatcaggcaaccaacctagtgcaatacgatcaacaaatgcaaaattattatgctaatcgtgggaccaatcagcaacaaactgattggtcgaccaagaatacggccttctttagtgaagtgcgacgaccagcagtggcgagttttttgaaaaaacagggctttacgttgaattaagaaaaaatggtacttatcttaaaggacaatcagttttctgattgtctttttttgtgtcgtgcaagctcggatatgcgataataaaactagtcaaatgtaaccggttaaataggtataggagtgatcgttatgagtttaattgatgtacgacatgtagccaagcggtatcagatgggcgagacaacaatcgtggccaatcatgatattagttttacagtcaatgaaggggagttagcggtgattctcggaccgagtggtgcgggaaaatcgacagtgctgaacatcttaggcgggatggatacacccgatgaagggcaagtgttgattgatggtgtcgatattgcgcagtttagtgcgcgccaattgacggcgtttcgccggactgatgtcgggtttgtgttccaattttacaatttagtgccgaatttaacgacgcaagaaaatgtggcgctggcaacggctgtctcgccgaatgctttagatgttgcgcttgttttgcaacaagttggtctacaggatcggcttcagaattttccggcccaactatccggtggggagcaacaacgggtggcgattgcgcgggcacttgctaagaatccgaagctcctcttgtgtgatgaaccaactggcgcactcgattatgaaacgggtaagcagattcttaaattattacaagaagttagtcggcaacaacaccggaccgttgttttgattacgcacaatgccgcgattgcccagatggctgatcgcgtgattcacattaacgatgcgcgcgtgcgttcaattgaagtgaatcccaacccacttccagttgaaaagattgaatggtaggtggttaatatgcagacacgtttatatttacaaaccacattccgcgatattcggcaggcgattggacggttcattgcgattatcctgattattttaatgggtgtcttattgtttgtggggattaaatcgattgccccaaacttagaagagactgtggatcattttgtcaccacgcaacgcgtatccgatttacagattagtgggaccgctggcttaacggaacaggaccgtgcggtggtcgaaaaaatgcatggtgtccaagctgaattgggttatcggattccgtatcgcgatgaagcgcgggatgttaacttacaattatataattaccaaccaactgcacggcaaaatcgcttaacgctgactaccgggcgctatccgcaacgaacgaatgaaattttagtggataacgcggtcaagacgcattatcgtctggggcagagggtgacggttaagagtcagcagctattgacgcaccggtttaaagtggtcggttatgtggactcaccgctatatatcgaccgtcaggaacgtggaaccgtaccggtcgggaatggtcagctagatggctttatgtatttgccacaaaaggcatttgcacctcaaccgtattcggtgatgatggtgcgctttagtgatttggatcgtcacagtagctttttacaggcttatcgcaccggcattgcgactaaagaaacacagctcatgcgccaattaaaagcacacacaactcagccacagcaacagtacttattaactgcgcgcagtgctaatccgggttttaatgaatttacgagcttgtcggatcgcatcgatgcgatagggaatgtctttccggtcttctttttcttaatcgggattctaattacctttacaaccattacgcggatgatcgaagaaaatcgtaaggaaatcgggacattgaaggcactaggctatcgtaattgggaaattgcgcagaagtatttactatatgcgctactaacaggtagtatcggcaccgtgcttggcaccattttgggcacgaagttattaccgctagtcgtctatcgaatccaaaaaccggtctacacctttgcgcattatccaacccatttttggacagttccaattttattagccactggagcggtcttgattgcgacagttggggccacggggtatgttttaatccgcgatttacgcgagaagcccacccaattactccgaccaaaagcgccgaaaccaggccaacggatttggttagaaagaatcacaccgctctggcggcgattgagtttccatcaaaaagtaacttatcgtaatctttttcgctataaagcacggatgattctgaccatcttaggcatcgctgggtgtaccggtttaatggttgcaggctttggtttaaagacgtcaattggcgaagttgctgaccgtcagtttaagcaattgacccattaccaagcaattgtgacgcttaaaataccgaatagtacagcccaaacgaagtcgattttaacacagactgagaaggttcggtcttacttaccggtcacaatgacccaggttaagttcaagcaaaaagggattacggatcaagcggcgacagtctgtgcggtcgctgatcaagcaaaacttgcacagtacgtcgctttgcaaacaccgcgagaacaacaacgactcacattgccgaaacacggtgcgattattgctgcgaacctcgctaaaacatatgctgttcaaaaaggcgattggttaacgctacaaacggcacaggggaaacgtgctcgcattcaagttgcagggatcagtgaaaattatctcggtaatagtgtctatctccgccaagctgctctttcaaaaacgctacaacaaccagttgcggctaatgcctatctcatgcgcaccgctaagatgactaccaagcaagaaaaacagttggcgacccgtttgcaacaaacaacggaagtggcggccacaacgtttatcagtgatcaaggggctaagcaagcaacggctagtgctaatttagacccaatcgtttttattttcatcgggttatcagcggttttagcgtttgtcgtcttattcaaccttactagcatcaacgtttcagagcgggaacgtgaattggcaacaattaaagtcctgggctttttcgacaaagaagtgacggcctatattgtgcgagaaaatgtaatcttcaccgttgttgggattgtgcttggctttggaatcggtaaattactgacttggttcatcatcacgatggcctcgtcagaacaagtggcctttccactcatcattccagctagcggctacctgattgcggcagggatgacggtgctattctcactgattgtgatggggatgacccaccgcaagttaaaagggattgatatgattggcgcattaaaggagaacgaataaaagttttagcaaataatgcttttttacttgcttgtgacgttacgtcatcagctagtatcaaggcatggaggtgatattctatgacgcaatatacaacaggtgaactcgctaaattatgtaatgtttcggtgcggacggtgcaatactacgatcaggccgatttgttgaagccggcaagcttaactgaaaatggacgacggctgtatggggatgcgcaagtgcagacgttaaaagtcattctaggctacaagcagctgggcttttcactgaaggcaattcaaaaagtgatggcgagtcaagcttcgacggatacactgacattgctagtcgaacaacaactcaatcagttagtccaaaaagaaacagacttagctaaccagaaagtggcgttgcagtttgtactgcaatcgattcaaaatactagcgcggtgccttttgaaatgacaatcagcgacatagaagacgcaatggctaaaacaacacagttaaaaagattacatcggcgaatgttgatgtggggcttattgattgatggtgtggaaattggcttattaattcttgggtttctaagtggaatttggtggccaatgtggattgggataccggtcatcattgcgatggccatttatgtgacaacattctactatcaagaaactgtctatctatgtcccaattgcaagacggtcttcaaaccacgcctaagtaaaatgttctttgcccggcacacgccaaagacaagacaactagtgtgtccaagctgtggacaaaaaaattactgcatagaacagagtgcgtaagcaggcgttcgtatttttaggattaactggatttgccgaattggcgacgcaatcgctaatttggcaaatttggttagccacagaaatatgcctgctgaagcacgtttaagaacagagtgcgtttggtcgcggttagcaaatgagcattaagacaaaatcaccagtaatccgtttttggaattactggtgattttagcttaagcggaagttgttgcgaccaaaaagcacgtttgaaccaggcgtgcgcatcaaacccaaaaccatctaagctgggacgatttcgtctcagcttttttgagtcagatactttataatagaagtattacaaaaataaggaatgatgcaaatggaaacgacagtgatcatctcgacgctctttcggttggcaaaagtcttcgatgacatgggtaagttattgttcaaagcgcatttagatgtgccgttgacgtttgaccgtgcgcaatcgcaggccttattacggcgcaataaccgactagaattcagctatcaacaacttaaaacaagtaaaacaaaactattaaatcaattattggcgacggcgggagccgatccctatttgtgggccaagttacggcgactgcaggcattggatgtggcgagtttggcagccgttcaagcaaatccgcaatttaaccgccaacgcaagattaatcgtttgaaacaactgattatcaatttacaaaatgaaaaaatcaatgagagtacggtactgacgaagcaggcgctcgcctatttataccatatagcccctgataaagtggcggccacgagtaagccaggaccgatactggccgatccatttgatagccgcgcttttaaaatggacatgatggctcttaattatttagatcagtattttaacgtgcaggaattgcaatattacgtgaagtacctcgtgtttattcatgcgcatcaagcggcggaagcggtgattcactatgatgcgcgaacggttttgccgaatgcggaacaaactggtttttcggcagttgcctattacgtcacgcttaatcgccaatcgtatacctacatttcctacaaggggactgaggggacgatggatgatccgcggattaagtcgtttacgcagcggctggataattatgtccgtgagagttatcaagattggaagtataatattgatgcgatgctgattggcaataccgaaaatgatgagcaactccaactcgcacggcggtttacgcggtatgtggtccggcgggtgcgccgaattaatccggcaacaatcatctatggactgggtcactcactcggggggcattttgtgcagacggtccaattattggatgaaccgtttgatggtggctataccttgaatgctgccccggttcagttaaaacaaataaagcattatcggccggatcttttatctgcttcaaaatggcaacaattattcgcattgactaagcacaacaatacgcaagatccagctgtagcgatgcaagtccacgcgattttggggcacaattacgctacaattgaaaatgaatggttcattaaagatttaacgcggatctattttggctttccgtatacgttctacattgggacgacgcgctatttgaatgctaaaaattggcattacccgtttgtgactgacgtagcaccatatctccgaaaagatgagattcaggcgtatagccagttctggggtaatctaattcgctatttgaaacgtgttgagactagaaatgggtcgttgatgttggcaagtctgatgacatatggactgcagacactccgtgaagtgtatgccgcgattaaaacggaacaggcccaacaaatttttgcggcatatgcgcgctatttatacgatgcgcacatttttaaagacacccccgttcaggtacagaccaattttgaacgggaattatcacggccgcgcacggcactccgtgtgttacaaggcgaatggccatttttgaaaagcgtcaacaatgagatggtcgaaacggtgattttcttccacacgattgaaggcgctcaatactttacacgctagacagatgggatgttaactaatggatatttatttgaaacaagcaattttacaagtggtcgaccgcgaactcggcgatccaatttactcacaacaggtgctagatcttaccaatgggaacacacgcgactatttaaccaacaagattaagaaattatcgtctgcccagagtaagaccggcgtgctacgccaagatgctgagctcgcatcttttctgcgcgatgcgacagctgattttatcggcgctagccaacgcctcgttgaaaaatggtacacggtctatcaaaaaagtgacgatgcaccgagtgcggatgcgtttgttgtcttgtatgaacaagatgcgcaagcttacttggcttttttgaaggtcgattatcatcaagccttcacccattatgtcaatgctgaagaaggaccattgatgaatcaactgattattcaccaatcgattctatcgaataaaacgcaaaaggcggatgaggggtttgcgattaacctccagacgtttggctttgaattgatggagaagaagtacaccttctccggtgaaaagatgacctacttatcaacgaacgtgattgaaagcgaaccagcgccatcgctagaagaaaacgtcaaggttgttaaaaaagccgctgaaaaaatcggcaagaagttcgaagttgccaaacacgatgtggtcgccaacgtcaaagaagccatctacgatacaatcgaaaccaatggtgaaatcgacacgagccagatggcagcgaagatttttaaagacaacgtttcagcccaaagtgagttcaaagcagaaatgacggaaaatgcgccagcagcaccagcgccaatctcaccagccgtccgcgaaatcgccgaaaagaaatacggcaaacaaaaactcaaactctcaaacggcatcgaactaatcgtcccaatcgacgtctaccaaaacccagcgctattcgaattcatcaaccacccagacggcacaatgtcggtggagattaagaatgtagaagaagtgattagtagattatagagtgcgtaggcaagcggttatattttgagcattaactggatttgcccaattggcgatgtaatcgccgattgggtgaatttggttaagtacagaaatatgcttgccgaagcacgtttagagtgcgtttgaagcgggtcgactttgaggattaactacaaaatgtgacttatgacgggtttggtcataagtcacattttgtagttaaccggaaaagtcagtttcgaaaagcacaccaaaaaagagcattcctctcatcctatcgagaagaacgctcttttactatgcctttctttttgcccagattaaacggataatcttatcgaattccgtgatgattagaatcaagaagcctgcgccgatcgaaacgccccattctaataaggtaagcggttcggtgtagaaggtttgttgcatgaatggcacgtaggtcaggatcaattggagaataatcatcagtgcgataatgccgaatgccttttggttggtgaagaaagcttttgaaaaggcgagtttcgcagtccgaatattgaacaagtagaaaatcttgctgatgacaatgatattgaccatcattgtgctggctgtgacttgatcgacaccgcggccgagtaaccaatcgtaggctaacaagccgattaaggccatcaagacggaaacatatgccatttggaaaacatcgtgtttattcatcagcgcttggccggtcttacgtggcttgcgggtcattaagccatcttcagctggttcgaagatgaaggcgaattgaatcgtaatcgccgagaccatgttaatccagagtaactgcgtcgcttgcaacggcatatcttgttgcatcaaaatcgtgaaggcgatgattaagccttccgcgaaggaagtcgggagtaagaagagaatactctttttgatgttatcgtaaatccggcggccttcacgaattgcgacggacattgttgcgaagttatcgttggttaaaatcatatccgcggaatctttggcaacatcggttcctttaattcccatggcaaccccgatgtcagcgcgcttcaatgcgggcgcatcattgacaccgtcaccggtcattgcggtgactttgcgactggcttgtaaggcttcgacaatttcgagtttgttatgtggtgtggtgcgggcaaagacttggtgttctaaagcggcttttggtttttcagcgtccgacaagcgatcccattccggcccggtaatcgcattaatcgttggtgctaagcctaacttttcaccaattgctttagccgtcagtggatggtcaccggtaatcatcttgacatcgaccccagcagcgttcatttcggcgagcgcttgaatgacttcatcgcgtggcggatcgataatcccggcaacccctaagagttgaatcccttgttggagttgttcatgggtaattgtagcagtcgttgttggcacgtcgagataaccgaccgccacaacccgtttgccttgttctgataaacgggtcacatcggcattccagtcatcgattgggaaatcgaccattgcctgttgggccattgggaataatttatctggagaccctttgatatagattcggtgcgtaccatcagttagttgcacgagtttagcaatgtagcggtaatccgaatcgaaaggtaacatgtcaatttctgtatttgttggtaagtcgtcgataccatgaaccttatgatataaggttaaaaaggcaccgtcagttggttcaccgttaatggtccaaccattgtcggcttgataaagcgtcgtatcgttggcttcataactagcctctaagaattgtgtgagggtggtatccaattcagcaggttggtcatttaataaaatctgaccttcgggcgcatagccattcccgctgacttggtaagtcgtttcggcggtgataatttcggtcacggtcatttcgtttttagttagcgtccccgttttgtcggtcgcaatcacgtcgacggagcccaacgtttcaacggcaggtaagctcttgacgatggcgtgtttgtgcttggccatgtcgctgacccccattgcgaggattacggacattgttgcgggtaatccttcaggaattgaaccgaccaccatcgtgacaatcgcgattgctaatactgagagtgagtaatgttcgccaagtaagccgaagaggaataaaaagacagccgcaccgatgacgacaaatgaaacgccggtccctaagccgttgatttcgcgagtcaatggggttgggcgggttttcgtttcggtgacagcaactgagatttgcccgatttcggtatcagcggcggttgcgacgaccacgcctaagccgctcccgttagtgacggaagtggaggcaaaggccatgttgacttgatcggcaagggcaacttcttcttcggttaagcgtgttgcaattttttcaactgagtctgcttccccggttaaggctgattcttgaatacgcagattatcggcatcaacgattcgtaaatccgctggtacactatcgccagcttctaggaagataacgtcgccgaccactaagtcttcagttgggatgtcgatccgctgaccgtcacgataaacggttgcttcggttgccaacatttctttgattcgttccaaagcatcagatgcgttcgcttcttgataataaccaatgatggcattaatgatgactactagaccgatgatgatggcatccgaatagtgacccatcatgagtgttaatagggctgcgacgattaggatgtagatgattaagttgttgaattggcgcacgaaaagttgccacttcggggtgtgatggctctcgagtttattcggaccattggttgctaagcggttagccgcttctgtttgcgaaagcccctgttcaaaatcttggtgggcataattggtttgcagttcgtctaatgtttgttgataagcgtatgttttagtcatggtaagctccttttaattatcgaaagtcaaaatgcggtcgttcgtgatcgttattcttgccgataataaggaataatctgatgaattaaacaaaacgcttcgtccgagccgtcatccaaaaatactcacctccagttagttattactctaaaattatcaggaaaaagtagcgatgtcaatctaatgaacactattaccaattcaacgtttaaactttgcgcccagtgcggctttgtggtaatattattacataagttaaaaaaacggttgaagcattgcgcgttcaagatttccttctttagggtggtagaagggaattttggcgtgctttttttatggagggaaatgaatcaatggcaactttagcaattattttaatcagtactttattggcaggacacatgagcaaacggattggaatgccagctgtgattgggcaactcctggtagggattattcttggacccgcgttgttcggtgtcttacatgaaaattcttttatccacacgttttccgaaattggtgtcgtattattgatgttcatcgctggcttggagagtaacctgaccttgttgaagaagtatttcaaaccaagtttagtggtcgccgtcttaggggtgattgtcccggtaatcagtatgtatgggatgagcttggcctttggcattagtcagctcgagagtttattcatcggggtgatttttgcagccacctcagtatcgatttcagtcgaagttttacgtgaattaaacgtgttagaaagtaaagaagggacgattatactaggtgctgcggtagtggatgacttactggccgtaattatcttgagtgtcttgaccagtctttttggggcgcaactggctgcagctagttcaacccacatgagtttagggttgagtttattgctgcaagctttattcatggttgcggtctactttagtgtgaaatggattgtgccatttgttatgcatttgagtcgtcgtttgttagtaccatatgcgagcgccattacatcgttaatcatttgttttggatttgtttggttcgctgaggccgttgaattgagtgcggtagtgggcgcgtttttcgcagggattgcgatttcgcaaaccccgtataagaaagaaattaatcgccatattgaaccgatcgggtataccgtgtttattccggtattctttgtcagcatcggtttatcgatgaacttagcaagcttgaatcaacatattctatttattacgattttaaccgtgttagctgttttctcgaagttaattggaagtggtctcggtgcgcgttggatgaataattcgccacaaggagcctatacaattggtgcggcaatgatttcgcggggcgagatggcgttaattatcgcgcagattgggtacaacgctaaattgttgagtgaactttattactcagagattattttcgtgattatcattaccactgttttggcaccgctgattcttaaacacgcggtgaaacgccaattagcaactgaaatcaattaagaaaaatcgtcagctatttgctggcgattttttttgcccttttttaaagttgacaaaaaaaggattgagcagtactcttatcaagttaagaaaaacatgtatttaattacatgatatggaggtttttaaaatgacaaaacaatttaaagaaaatttgtccgaaaattcggattaaatttgcaatctaccaattttatattatttcatccggcaacttgacaggaccctagtacatagcttgagtggtggttctttttttattttagacattagttcatttaattaggaattcagatagggaaatatactgaaatgaacgtaactgataaagtcggtcaagagtggcaatttatactaatttttgaaattacagataaagaagctaatcagggcaccgttgatttgaagaaagcaattaactgaggtgtcttactttaattgcctagcttgtttagttgacccacttgtctagaaatgttaaattgattctattcaataaaggcgttgattgttgggaggcgatgaaagtggatgaacgcattacagaataccgggatgcggtttatgagcaggtggtcaaagtcgggaagtcgttagggaacgtgacgcgtctacaactgttgaacattcttgcgcaaggccccaaaacggtggaagtcttagccagtacagtcggcttaagtgtcgctaccgtttcacggaacctgcaaattttgaaacaaacaaacttagtggcgattgaacgcgagaagaattttgttacttatcgtttaaattcagaacgggtcaaacaattggtaaccctcttggttgatgtctgcgaagaaactttgccagagatgacgattttggaaaaaacactcgcgcaagaaacaggtgcccccgaagcgttaactggtgacgcattgaaaacgaaattaatggcagacgatgtgtgtttgattgatttgcgtcccgcagatgagtttgcaagtcaacacttaccaggggcacgcaatgtgccatatgatcagttggatcaacgattagctgagctccccaaggataaagaagtggtggtttattgtcgtggtcgtctatgtgcttacgccaatgttgctagtcaacaactacaagctgctgggtttaaagtggcaacgtttaatcaatcagtgtgggaatggtcgcgagttatgaccgaaacggaataagatgaagcgtcctttttgacggcacgtcccaatggtggtatattatgagtaattcaatgaaatcgttgaatgattttcttgaaaagaaaggtgatcgcaatggcaacacaaattctaactgaagcaaactttaaagatgaagttcaagaaggggtcacattagtcgatttctgggcaacatggtgcccaccatgtcggatgcaaggcccaattgtcgaagaactagccgacgattacgcgggtaaagctaaaatcgccaaagttgacgttgatcacaaccaaaacttggcggctgaattcggcatccaatcaattccaaccttgttggtcatgaaagatggccaattagtgcaacaaatggttgggttacaacggaaagaaacattagcacaagaaatcaatactgccttagcttaaaaatagcttgaaggcgtatcacgattaaataataacatcatccgataagctcttaagtagggcatatattaggtgatgtttttttgtgttgttattttaagtaatccagcataacggctttaaagaagtcgatgtgtttgaggtacatttcttcatcaacatattcgtcaatcatgtggctagtatcattgccggggccgacaactgccactggtaagtcaggattgtgcttagcaaggtgggcggcgtcggtaccgccagcaacgtgcatcagtggataagcttgggataacttttgtgccccgattttttgaacagcttgaatgaatggtgcttgtggattgctcttaacgggtggttggttattaatgacggtcaattccagattcatgtctgcctgttgattgagttccgcaatgatggtattgaggtcagcaatcacttggtcgccagttaaggcgggggttgtacgaacccgacaagtaagttctgcgtgaccggggaccgaattaatttgttcaccaccgttgattaaggttgtgacaggcacgatatcgccgaggacatcatcaataggatgtttctgatcgaagtattgtttttgccgattgtagtaggcaagcaaatgatcaattgcgttaataccgagtgcgggcattgaactgtgcgcggttttaccagttgccgtcactttaaaatcaagggaaccgttatgggcgaaaattaagaaatgttgttcattggtttgattagccgcaaggagtttttgggccatttctgtggggaatttgtcggggttatttgccaaggcttgtttatcaacgccagatggttcggcaactaataaggctgttaaatcatcggcatagccttgagcggttaaagtttgcgcaccagtttcgttcttttcttcatcgacggttgcgagtagtttgatttggccgtttagaggaacatgttcatcgtgtaattcgatcattgcaatcacaagcgcagccagaccagacttcatgtcggttgcgcctcgaccgaagagtttaccatcgcgagcggttagagtgaagggatcactcgtccatttgctgcgtcaccgatgctgacgacgtccatatgaccagtgacaccgaggaatttgtcggttgcttcgcctagataggccactaagttttcgcggcctggtttagaagccactttttcagtatggataccatgttgtgcgaatagatcggctaagtagtcggcaatcacaccttctgcttggtctgttgtatcaattgagaccagtttttctaaaattgcgattttttcagttttttccatcatcaaaagacctccagataagattcaatatgcattatagagcccctattttgggaaagtaacggacataaattaagcaatttcgcaaatcaagtgggttaaaaaagccgtcacgcttagcgtggcggctttttattggtctggttggtgagggcttctttaaaagcctgaccggcgcggtttattcgttaaaccagtgcatatcaaacagaacgcatggattggtgccggcgcaacgattttaccgggggtgacggtcggtgagaatgcgattgtcgctgctaacgccacggtcaccaaagatgtaccagacaatatgattgttgccggaacgccagcgaaagtcatgcgtcaaatcaaattagaaaaggagttttaacatgtcaattcaaaataaagtcgtgatcattacaggtgcctcatcagggattggggcagcaactgccaaattattagcaagcaaaggggctaaggttgttttagcagctcatcgtgaagatcgtttacaagctttagcatcagaaatcggtgcaaatgcgatttatcaagcaacggatgtgactaatcgggatcaaatggcgagcttagtccaattggcgcttgatcatttcggtcgcgtagatgttttatacaacaatgccggcgtcatgccacaaggaaacctgagcgaacgcgattatgatcaatggcaaaagatgctcgatatcaacatcatgggcgttttaaacgggatcggtgcggtcttaccaacgatgcaagcccaacaagatggtttgattatttcaactgattcggttgccggacatgtggtttatccagcttctgccgtttataacgggactaaatatgcagtgcgcgctattatggaaggcttacgccaagaagaaaaagataacggcattcgttcaacaattgtttcaccaggggctgttaaaacagaattggtgaatacgattggcaaccctgctgttttcgaaggggttaagcaattaatggatgcaccagaagaatcagcgttggccctcaatccagaagacattgccaacgcagtcttatatgcgattgaccaaccagaacatgtagtggtcagtgaagtcttaattcgcccagctaaacaacaagtttaaaaaagtggtcgactaagcgattagcctaagcaggcgaataactgatgcagttagttgtttgactgatgtagctaaacacaaggcattgcttaggcgagcccgtttcaaagtggtatttagctactgagaattaataaaaaatcaccttaatctgttttttaagattaaggtgatttttttaattaagtgcaaccaagctgataatcaaaatatgaaatggatgacaacagcttttttaggctaaaagtcgtataatgacagtattctaaatgaaattggagatcataatatggcagaattgatgcgtttttatcaaagctttcaaccggaacattatcaagtttttctagatattaatcgggctcaaaaacaatttagtggtcggacgacaattacggggactgctaaagaagcacttgttttaattcatcagaacggtttagtgattgaaacagtgacggctgcaggtaagagtgtgccgtttacagttgataatgacgcaaatgccttgaaagtcgaagtcggccaacctggcgaagtgactttggtaattgcctatactgccgctttaacggattcaatgatgggcatctatccttcttattatcaagtcgatggggtgcaaaaagaattaatcggcacgcaatttgaaaccaattttgcgcggcaagctttcccatgtattgatgaaccagaagccaaagcgacttttgatttagcggttaaattcgatgagcacgaaggcgaaacgattctgagcaacatgcctgaaaaagaagtcatcgatggcgttcaccactttgaaacaacggtccggatgtcaacgtaccttgtggcctttgcttttggtgaattgcaaggggttcaaaccaaaacggagagcggcgtgcaagttggcgtctttgctactaaggcacatcaagcaaacgagctcgattttgcattggacattgctaaacggtcaatcgaattctttgaagacttctaccaaacaccctatccattaccccattcatggcagttggcattgccagacttttcggccggcgcgatggaaaactggggcttagtcacttatcgggaagcttatttattactcgatcctgataatactgccttggatacgaaacaccgcgttgcgactgtgattgcgcatgaattagcacaccaatggtttggtgatttagtaacgatgcaatggtgggacgatctttggttgaacgaaagttttgccaatatgatggaatacgtcgcaatcgatgcgttgcagccggactggcatatttgggaaagtttccaaacctcggaagcagcggcagccttacaacgtgacgcgactgatggggtccaatcggtgcatgtgcaagtcaataatccagccgaaatcgatgcgttatttgatggcgcaatcgtgtatgccaaaggcgcccggatgctcgtgatggttcgcgctttaatcggtgacgatgctctacgcgctggtttgaaagcttattttgcagcacatcaattcggaaatgcgactggcgctgacttgtgggcagcactggggaaagccgctaacttagatgttggggccattatgcattcatggctcgaacaaccaggttatccagtggtaacggccaaagtcgttgacggacaattaacgcttaaccaacaacaattctttatcggtgagggtcaagaagttgggcgtcaatggcagattccattgaagagcaactatgcggcagccccattattgatgactgaccgtgaattggtactcggtgattatgctcaattacgcgccgacaatgggcaaccattccgcttaaacgtggggaacgaatcgcatttcattgttcattacgatcaaacattattagatgatattttaaatagtagtgctgacatggcaccaattggacaactgcaactactgcaagacttacgcttattagctgaaggacgtcaaatttcgtacgcagatgttgtgcctgttttagcaccttttgccaagagtgattcaaatgtcgtggcagatgccctttacacggttgctggtaacttgaagaaatttgtgacacctggtgaagaaagtgaacaacacctgcgtcgattcttcgaccaattgagtaaagcgcaagttgcgcgattaggttggctggttcaaccgactgatagcaatgacgatcagttaatgcgcccaactgttttaagtgcagccttgtatgctaaaaaccaagcagccattgatgcagcccatactttattccaagcgaaccaagaaaaactggtcaccttaccagccgcaattcgggtactggtcttgatgaatgaggtccaaaacttcgggaatgccgcactttatgatcagctcttagcagcttatcgccaaacgagtgatgcgagctataagaatgatttgactgcggccttaacgcgcacgactgatcctgaattaattgcgaccttaattggaaaatttgaagatgccagcaccatcaaaccacaagatttgcgggcttggttccgcggattactcgccaacgacaagagccaacaagcaacctgggattggattcgcaacgattggcaatggctagaagagacagtcggcggtgatatggaatttacaacgtatatcacctcgattgccgcaatctttaagaccccagaacggttggcagagttcaaagccttctttgaacctaagctcaacaccccaggcttaacccgggaaattacgatggacattaaagtcatcgaaagtcgggttgcattgattggagatcaaaaagcagcggttaatgaaacaattgccaaacatatgtagtcgaacgttgtgcaagttaaattcaatttgaggggttttgagatgacgattaaattagtcgcgattgatattgatgatacattattgagttcacagcaccaactgctagccagtacgaaacaacaagttgctaaggccctggaacagggtgtgaaagtcgttttgtgttccggacgcccattagctggcgtggtgccctttttaaatcaactagggattgccggtgataatcaatacgtgattacgtttaacggcagtattatcgaaacggcgtctggtaaaatcttgaaagaagctggcatcagccgagaaacctaccaagcgattgatgactactcgcaagcaacgggcttaccgtataatgtgctcgatcaaaatagtgtgatttatacgagtaatgtgaatgttgcaccaatgacggtggtgcaagcttgggaaaacgaagctggtattcatattcgcaaaccgaatgaaatcgacgcggccacgcagatggtcaaagcggtctttacagggaccagcgaacagttagatgtacatgaaccacaggtacacgcgcaatttggaactgataattatgttgttcgtgcggctgacctctttttagaagtgatgcacactgatgttaataaaggcaaagcagtgcaatacctcgcgaataaacttggattcgcgccggatgaaatcatggcgattggcgatgagaaaaatgacatcccaatgttccaatttgccggtactgcggtggcaatgggcaacggttcagctgaagcaaaggcgcacgttgactttattactgctgataacgattcggacgggatcgctcaagcatttgatcaatttatttttaaagtataatcaaaaagcccctgacttttgtcaggggctttttcttcgatattataggtcttcaccattgctagcaatgacctttttgaaccagtagaacgattctttgcgactgcgggcgagtgttccgttgccgtcatcatcttggtcaacatagataaagccatagcgtttagacatttcagaagttgaagcgctgattaaatcgattggcccccacattgtgtagcccatcagatcaacgccatctttaacggcttctttcatttgttcgatatgcttgcgcacgtagtcaatgcggtactcgtcgtggatttggccgttcgcgtcaacctgatcgattgcgcctaagccgttttcgacgacgaagagtggcacaccatagcgttcccagagattgttgagggtaatccgtaaaccaacgggatcaatttgccagccccaatcgctagcttcgagatacggatttttttcgccgagaattaagttgccggctgttttttcgccagcgggtttcgctgagctgaccatcgacatgtaatagctaaagcttaaataatcaactgggtagtccttgattagttgtaagtcatcaggcgccatttcaagtgtgatgttgtggtcgttgaagtagcgattcatgtagttaggatattcgccacggacttggacgtcggtgaaaaagaggttcaattcatcatcttgttgtgcttggcgcacatcagcggggttcggtgttttaggataactttgcatccgcgctaacattgaaccgattttagcatctggcattaatccgtggcattgtttaactgcaatactgctagcgacgaattgatgatgcagtgcctgatagcgcagttgtaattgttcatcgggggcgagcgtatcatctaccgcgccggtaccagtgaagccccaagtacctgcattaatttcgttaaatgtcatccagtatttcacttgatgctgatagcgtttgaagaccgtttcggtatagcgattaaatgcggcaatcgtttcgcggctagcccaaccattatattttaacgtcagtgccaggggcatttcataatgggagagggtgacgactggttcaatgttgtattttttaagttcggcaaaaacgttatcgtaaaatgccaagcccttttcgtttggttgtgcatcatccccgtttgggaaaatccgcgcccacgcaatactcatgcgaaaagccttgaagctcatttcggcaaataaggcgatgtcttctttataatgatggtaaaaatcgatcccgcgccgtttaggataaagggtatcggttggatcgtcaatcgcggtttgaatgctgtctttggttacggcgttcatcgagaagttctgacggtcagtggatttttgaacgacttcggcagttgtgagtcccttaccatcaatgttccaggcgccttcaatttgattcgcggccgttgcaccaccccataaaaaatcaggtttaaagccagtgattggttgttttgaatacatagtagtccctccagaaaattaaaatggttgtccgtcatataagacactaccattggtcttaatgatgttttgataccaatagaaagaatctttcggtgtacgcgctaaggtaccgtggccgtcgttatcgcgatcaacgtatacatagccgtagcgtttcgccatctcaccagagccggcgctgattaaatcgatacagccccatgaggtgtagccgatacaagggccgccatcagcaatcgcttggcccattgcggtgatattttcttgcagataagcgatccggtagtcgtcgtgaatctgaccgtccgccgtgactgtatcgcgtgcgcccaggccgttttctacgatgaagagtggtttttgataatggtcatagagttgattcattgtaatccgtaaaccgaggccatcagtttgccaaccccattcgcttgttttgagataaggatttttgagtgaggcaaagacgttgccttcagtttggtcgttgacggttgggtccgcgctggttaaacgagatgaataataactaaacgagataaaatcgaccgtgttggctttgagaatcgcttcatcgtcgggcgtcatttctaagacgacctctttagctttaaagagccgtttggcatagtttggatgggcccccgcgtgattgaacgtcaatgaagaagtagccttcacgattggtttctagtgctttgaagacgtcagctgggtttggtgtattaggataagtttcaccggcagctagcatacaaccgatttgattgtctggatcaatttcatgcgcaagtttggtcgccaatgccgaagccaccagttgatgatgggaagcttggtatttaatttgatccgaatgattggcatctgagacatccatgccgccacctaaaaatggaatatgcaaaatcatattgatttcattaaacgttaaccaatagtggactttgcccttgtagcgtctgaaaaggacctcgcaaaagcggaggtagtgatcaatcatttgacggtctgcccacccgttgcatttgtccatcattgccaacggagtatcgaagtgattgatagtgaccagtggttcgatatgcagttcacggcaaagatcaatcacgcggtcgtaaaaggtaagcccggcctcgttaggtgttgggtcgtcgccgtttggaaaaatacggggccaactaatcgagagtcgataagttttaaagcccatctcagccatcaagcgaaggtcctcttcataatgatgatagaaatcaacggattcatgactgggataaaagtcgtattgcgtagcttgtgcctttttaggatgcatcaacgcctcccaacgaccatgatgcgcgtctggcaggatatcgacaagcgataaacctttgccatcggtttgataggcgccttcgtattgattggcagccgttgcgccgccccagagaaagtcttttggaaatggtgtgtgattagtcatcatcggtctcctttaagtattatttgagatttaaaagtttatcgttggttgtgacgcggccacttgtgattaatggatcaacagcgtcatataaattactgttggtgataattacgggtgtcgcgatttcataaccagcagcttgaattacttcgatatcgaaggtgagtaataagtcgccaggcaggactgcttggccttgtttcacgtgaactgtgaatggtttaccttcgagttgaacagtatccatcccgatgtgcattaaaatctcggcgccatgttcagaattaatcccaattgcgtgtcccgttggaaagacgaggctgactgtgccggcaaccggtgcgaaaagttgcccatcggaaggaataatggcgacccctttgcccatcaccgctgatgagaagacagggtcctttaacgctgagagcaattggacagttccgttaagcggacttgtgatgatttcaggtgtgactttcgcagcgggagtagcagtacttggtgttgtttctggtgtagttgtcggtgtttcaaccatagccacttggtctgctttagagataccgaagaataaggttaataataaagcaaccacaaaagcgacagctgaagcgatgattgcaccataaacggtcatatcgagaccagttttaggattgataaagttgggtaaaccaaagacgccaagaccaccaactaagtaaccacgtgtcccgaataaaccgagtaaaattccaccgactgcgccaccaatacaactgaaaacaaatggtttttttcgtggcaaagtgatcccgtaaattgcaggttcagtaacgccgaagattccggagatgaatgaagaccaacctaggccttttaattttatatttttagttcggagggtaatcgctaaaacagaaccgatttgtgcaaatgatgcagcgaatacgagcgttaaaatcgtgtcgtaaccgagtgtggaaatgttgagaattgccagtggcacgatgccccaatggagtccgaagataaccaatacttgccagagtccccctaaaacagcaccggtcacaactgggctgaattgatagagcgcgttactaccggcccctaataaatcaccgagccatgttgataatggcccaatcactaagaaagtcacagggacaacaactaacgctgtacaaaacgggactaagaatgtgcgaatcacttctggtaagacttttttgaagaatggttcgacttttgaagtgaaccaaacagcaacgatgatggggataacagatgatgcataactcatcataatcactggaatgccgaggaatgtggtgtagataggagattcaaaaagggtgccagcaaataatgtgtagagtggctttgccccggactgtgccaacgtggaagggattaggccaacaatcgatgggtaaacgagggtggccccaatcaccatcccgagaaatggattgactttgaatttcttgctggcgctgtagcccaacataatcgggaagaaatagaagaatgaatcaccgagtgcgaatagaatctgataagtgccagatttagtcgtgagccaaccgactgcgacaaagagcgcgacgagccctttaatcatcccagttgcagctaaaacgcctagggttggtgcgaagatgccagaaattaaaccaatgaaccggtcaagcaagctcatcttcggttgttgatcgtcatcatcaggcacgatgccttcaccagcaatgttgccgatttttaaaagggcatcgtacacatctgcgacctgattaccgataacgacttgatattgaccgccactttggacaacggtcacaacgccgtccatattttttaacgtgtcagtctgcgcctttttttcatcctttaatttgaaacgcaagcgcgtggtacaatggacaacgctgcggatattgtcggatccgcccacgtttgccaagatatctgttgcaagttgttcgtaagccatgatagtacctccttagattaataatggttaaaacaaaaacccggctaatgaatacagcctaaaaataggttgcattcgttaactgggttaatgcctgatcgaatcagtaacacaccgttttattcagtttgttgatgttgtgtgacacgccagatatgcaagagcagataaaccgcttcatcagactgtaaagtccagttcatttcatgctttaaaaaagcagaaatctgttggacgacttgataagcttgtggatagcgggtgatcatcatcgccagcagtgccggatcgagttgtgtaacaggttcctgggctttttttagtcgccgaataatgaagtagcgtagatgtgagataaaacgactgtagttaaaggaatcttcatctagaataatcccaaagtttttttgaacaatgccgatgatattggccacgagcttggtcatagtcatcgtatcttcaatttcgctatcgccgtttttgatattgacgaaatgataggtgagcgggacggtttcaccgtctggaagggtgaaacctaatttttgattgatgagcgcaattgtctgttgtgcggtttggtactcagttggaaaaagattccgtagttcccacagaagcgactgatcggttagcgtcacatgggcatcgattcgttgaactgcaaattgaagatgatccgctagaatcagatattggcgatcgttaattttagtattaagtgctggttcgactaacgccacgatttcagacatgatggctagcatcttagcgttaattgccgtcaatgcttggatttgggtagcatcaaagcctttagaaccagttgcaataaagcgccgttcgatttttgcttcatcaactaaatcaccaggctgtttgccaaaaccgacgccgttaccaatgacaatccactcaagcgcttgttcatcttcaaccagggcagcattattattaaaatttttttgaaatttcatcttacccctctttcttataatgacatgaaaaagacccactagttcatcacagggttactgttgtgagaagatagtaggtcatgcctgatcgaatcagtaacacgctatttgatatattcaatatataccataagtgtaagcgttatcaaataataattaaggcataatcgataaaatagttaggtttttattgacataacctaactatcgcgttaaactgattttcgttaggttaaccgatataaaaactaactaattatgaaagcagtgattaatatgacagatgaaacacaatcaattatggcgttattcgcgcagttaattcaatcacggtccttcgtcgcatcggcgtggatgaccgttggtaaggaacgccgtcgcgattttatgaacacgaaaggcaaatcacgactcttgaatttactttctgcaaaagatggcttaacgaatgctgaaattacagaattattggatattcgtcctagttcagtcagtttgcaagttaaagcgttagaagaagaaggctacgtgatgcgccaagcctctgaagcagataagcgcgtctcgctcatctttcttacggataaaggtcgggcttcaattgaaaaagggaatttggaaaccgatcaattatcagaaacgattctggcagggttaagtgaagcagaattaaaagagttacaggccagtttaactaaaattgcgcataatgtgaaacattcacagattgatgcggcctttttcgaacgggcgcatcaaatgcggcaccatcatcatggagaatggaatcgctcaagattcccttggtaggaggttgttagcatgcaacaaatgagagtcgcaccatctaaaagtcaatttagtttcaaagattttctcggattaattaaggatacgaaaccaaagtattggcagttgtttgtgggattagcgttaggattagtcgcaaccggtgttcaattagcggtccctagttatgccaaacaactaatcaatagtttttcaaaacagtttaatatttacatgctcgttgggattgtcgtgttgttcattttaagtgcagtgattagtgccgcttcaggctcattactcggctttttcggtgaggacgtcattcagaagttacggaataacatctggcgtaaattactgcatttaagagtcagctacttcgataacgtgaagtcaggcgaaatgacgtcacgattagtgaatgattcaacgcagattaaagatttattatcccgatcatttcccgggttagtgacagcgatttttacgattgttggcgcatttgccatcatgcttttcatgggttggaaaatgacgctaattatggcattctcagtaccgctcgtcatggctgtcatgttgccgattgcgaagaagtcccacgccatcggccacacacggcaggacgaactcgcgcgtttcaatggtgaaacagacgaaacgcttagtgaagtcatcgaacgctgaataacaagccagtcaacaagggcaaacagcgattggtaacctctataaaattggtttaaaagaagccatttatgactccgttgcgggtccgattatgaccgctgttatgatgggcttaattgtcggtattttggcttatggctctgcacgggtcgcccaaggcacaatgacgattggcgccatgttctctttcttgatgtacctatttcaattaatgggaccggctgcaacgctcggtcaattcttgacgaccctttctaaagcaagtggttcaacggaacggattcaagaattaatgcaagagccagaagaagatttcagccaaggaaccgtggttgatgtcgaaggacaaacgttgcaggtagagtcagttgagtttggctacgatgatgaccaaacgattttgcacgacttatcatttgaagcgaaacccaatacggtagtcgcatttgctggtccttctggtggtgggaaatcaacgattttcagtttgttggaacgatactacgaacctcgctacgggacgattaagattggtgaaacgccaattaatagtgttgcattggccgattggcgtaaacagattgggtttgtgagtcaggattcagcgattatggcaggtacaatctgcgataatttgacgtatggattgactggtgagtattctgatgcgcaattgtgggctgttttacaactcgcatttgctgaaaaatttgtccgtgagatgccagaagggctcaacacagaagttgggactcgcgggattaaagtttcaggtggacaacggcaacgattggcgatcgcacgtgcattcttgcgtgatccgaagattttgatgttggatgaagcaacagccagtctcgattccgaatcagaagcgatggtgcaaaaagcgttagaaacattgatggaagggcggacaacattagtgattgcgcatcgtttaagtacaattgttgatgccgaccaaatctatttcatcgaaaacggccacgtctcaggcgcgggcaagcaccaagaattagttgcgagccacgaactttacaaagaatatgtcgaaacacaattcaaccaagactagagtgcgtcattaacgggtagcttctgagtagtagcagcgtatcgtgaatgaacgataaaggcgttcgtttgcgatatgcggctaggcgtaagaagctgttaatgaaagcacatttcagattagagtgcgttattaatggtaatcgtttattttaagtgcttttaaaaacagagtagcgtccaattgattcgggcgctactctgtttatcgttttggggtataatagtaggaaatgataactagttggtgcataatagaccaacaaaaaagttttgagtaatggagatataacaatgaattttacttagtggcgctgttgttagtcggcgtgatcgtggtcaacgtggtcaagcaacttgtaccacggataccagaggcctttttattaattgcgatgggttgggggctatcgtttatgccagtgttccataatttcaagttggaacctgaatttttcatgttactgattattgcaccgttaatgttcattgatgggcaaaaacaatcctttgccaatattcgtaagagattccaaggaatttttctgttgtcagtcgtcttggcggttgtcacggcagttgtggtcggtttgattacgaaacaaattgaagcacaatggaccttcccattggcgcttgcactagctgcgattgtcataccaaccgatgcggtggctgtgaagtcgatgactggtagcaacgagatgccaaaaggcgttggtgaagcgcttgaattggaatcactttttaatgatgcgaccggattggtcttgttagaccttgcgttatcagtgctctcaaaaggcactttttcagtcgtacagggaattggacacttcctttttgtcgccgttggcggggtggtcatcggtattattggtgggttcttattggtaatgctccggtttaacctgaatcggcatggtaaaaatccggaattaacaacgattccgattagtttgctaacaccatttgcgatttacctattggctgaacattttggccgttgtcgcaactgggattgaacataactgggaagctgatcggctgcgattaacttcgaccaatgtgcaactcacatcacggacaatttggagtattttatcggatattcttaatgattttgttttcttaattttagggatttcattaccagaagttgctcgaaacttcacgcaaatgggctggcgcggggctgtggcattattaggggttagtgttttaatctatgtagcaatgtggattgtccgttacgcttgggtattacgtggggacagtccatggattgctgcctttttcggtgatcccaagggtgacgatcggccattctttgcgtgtttatttgctgtgagtgggattcatgggactgtgacgctagcgatggccttttcattaccaaataggatagcggggcatgcgtttccatatcgtaatgagttgattgcgattgcgacttttgtcatcttaatcagtatggttatgagcgcaattgtcttaccccgtaagttacctcaaaagacggaagcttatgcaatggctgatctggatcatattcgcaataaaatggttgattatgtcatcttacaaatacggtcacaaattgaagaccatgcagtccgtgaagctttgacagatcaattacagtcacaaaagagtaatcgactaacggtcgatcgtgctcaaacaacggctaactatacagcgttattgagtgaaactaaagaagtcgttgataatttccttcattgtgatgatgttaatgaacggtacagcccagaagttgttaatctgtatgatcgaatttttcagcgcgtgttagttgagtctaaacgcgatcatcttgggttacgcatgaaacatacgattaaacattggaagaaagagctgttttggcacacaagtcatcgcatgattacaaagaaacagcgactacggttccatgccgctaaaatggccgataacccccagtattcagaacgggttgagacttggcaagcaacttgcgatgctttattagcgcttaacagtgaagtcacggatgcgattgatcaatatctcgatactgttttgacgaatcgcttgaaacaaaaacacagtgataacgattttgtttacctagttcggcggacaatgaatcacttctgtgcacacgttaaacatgattatcaaaagagtgcagcagttgtacccgatattctatatgtacaagctttccaacacgaatatgattttgttcaacaagggattaatgctggctatattaatcaatcgattgcaggcgttttgtataccgaaattaatcaagcacagttattgcaactccaacaattccaaggaacggatatggctttaatcgaggcttaagaatctgagctttattttcattgcggtcactggtaatgtggcagtataggaaagggtgatgacgatgcaatttggtgaacgattaaagcaacaacgagaacaacgcgggttaacccaggaaatagtcgcgcaggaatttcatgtttcacgcgcaacgattgccaattgggagcatgagcggagttatccagatattaactgtttaattgccatcagcgactactatcagatttcgctcgatgttctattaaaagaagatagtggcatgacagaagcgatgcaacggaaactcgagttgcaaaagctaaagcccttctattggggttcgttattaattgatggctttattttagtgattttaatgggtcgcttttatcaattaccattcctgaaaactgatccgtttttagtaatggtgattttgctaatcgaagtagctaatctctacatgatgttgacggttcgtaaccgtcaacaacagttaggaattcaagatatatcacagaagtcgattatgatgtatgtattcggtggattaattgttctgttaattgttggattggcactactctcaagtcaatggggcgcaattggcgttattagtgggggcgttattagtgggattgtcatgcgggttcgacaacgccgctcgaagaatagctaaataagtgcctcaaatacattagttgtgcctgctttttggagtctgttagtaacattaacaggggtaattagcttggtcaaacgaaataaaaaagcttaattcaacctctttttctatgcattatgatgatcacttgtttgtgtgatttgattaattttcgcgtgtaattcatggacttcagcttccttatccgctaacgctttatcaaatgctttttgattctttattttttctgcttcaaccgctgctttaatttgagcagcttgattgtcgcgtaattcagtgacttctttggtcatttccttttgtgctttccgttggctcaacgtgctgccagtcgctgccaagaaggtaatgatggcgccaatcaataatgacaccaaaataacgatgattaatggccatttaacatgggtgaatccaaagttaatggcgactggttcaacgtttaaaacagcaaaaattacgacaattaatgctaggaccaatactgtaattaatcgaccttgtttttttataaaactgcccccctacttcttattcaataagttaccggcaacatagtctccgatatgtggtgccagttgatagaattgtgcaccgatcgccatcaaccatggtgcattaatttcacgttttgcatgcccgattgttttcacaatccgataagctagttgatcaggatctaaaacaacccaatcgaccgatttcaaataattaccggtcttatccgcaatatcaaagaaagctgtatcaatcggcccaggattaacggtagtcacttgaaccccaaatggttttaattctaagcgtagaccatttgaatagccaacaaccgcgaacttagttgccgaatagatggccgacttaggtgttgccatcttgcccgccattgaagcaatgttaatgatgtggccgctaccttgttcaatcatcatccgcccaaaagcgcgcgtcatgtacattaaacctagcacattaacccggaacatctgctccacaacggtcatggatgtgtcgaatgcattttcaaaacttccaaaaccagcagcattgactaacacatctggaatcccgacttcagtttgcacctgagccacaatggtttcaatcgctgctggatcactgacatcgaggacatatgcatacgccggctgtcctgaaagccggtgtgcttcttcgcgaaccgccgccaattcagcttctcgacgggccaaaacgacgataattgcccctttactagcggcttcataggcaatcgctcgtcctaaaccagacgagccgccggtaatcaccacaattttacggtttaaatctctcaatgctgctaatttagtcatctgtttactcctttcgaccatgaaacggaatgtcatagatatctaagtcactaactacttttgtgtttttaaaaatatcgcgggcatcattttgtaaatcacgcactgcttgcccgaggtaccgggcagaaatatgggtcaataataaccgcttcacatgcgcggcttttgcgacctttgctgcattaatgttagttgaatggaaatattgacgcgcaatcttttgttcttgcttaccaaaggtcccttcatgcactaatacatctgcattagccgctaagcgttcaattggtggacattggcgggtatccccaataatggtcacaatccgtcctttttgagcatgtccaatgtaatctttgccatcaatttggcgcccatcagcgagtgtaaccacttctccctttttaatctttgcgtatacaggaccagccggaacaccatctgcatgcagtttctcaacttgcagttcccccggatggtccttttcaataatccgaaaaccataactggcaatccgatgatccaatttagcacattcaacccggaaagtcgcatcatcaatcaaaacaccttcttcaggaagaatgacaaagttcaatggatacgttaaatgactttcagagatttttaaactcgtgcgcacgtattcttcagttcccttagggccgtaaatcgtaagtggttcgtcgccaccttggaaagatcggcttgataaaaagcctggtaacccgaataaatgatccccatgtaaatgtgtgagaaagatctttttaactttgcgcggttttaatgtcgtttttaagatttgatgttgcgttgcttcaccgacgtcaaacaaccacacttcatttcgttcatccaataatttcaatgcgacacttgtgacgtttcgttgtcgtgctggaactccagcgcctgttcctaaaaattctaattccatttagctcttccaatctgtctttaattcaacgctttattttgccgcgagggctttggtaataatggcggcatattcattgaccccagttgggttcggatgcaccttatcttggtagaaccagtcactgtgtttggcagcctgtgaataccaatcaatcaccgttaagtttggatactgtttagttgcatttttaagcgcctggttaacatcattttgccaaggacgcgttgggacaaacgcgttgagccaatagacttttcgcttagtcccaatggctgccataaattgcgccatctgttcttgcgtaaaggcgccatttgttcctagactgaccagtacagtatcgctaagggcttgtttttgatcataaccttttacaatttgaatactttgatagagttggcgcccaacagccgcatcaaccaacatattcgggaataacttctgtaaagcttgactaccgtcgagtaggacggaatcaccaattgcagtcaccgagatattctgggcccgttgaatcgtcacttgactcaagccatatttttcaaattcttggttgattggatgcttttgcgcagccgcctcagccgctttttcagcttttgaagttggaccatttgcttgtccagctttattctgggcttttgcttttttaatcaacgcatctttacgcttttggttagctttttgattttgcttaatattgaccgctaatgccgatttatgcgtatctggcgccggttggaatggcgcttgaaacgccccgactaacccgattaaaaagacaattgcgagtccagtcactcgaccaaccacccgattccaatgtggttggtgcataaattgcttcaattggtgccataactgcttgtacggatagtgtgctagtggctgttcaataaaccggtaggataattcggtcaatccgaaaataatcgccacttcaatcactggatataaaaccgggtgatcagcgatatttttgaagattgtttcaaagaaaatcatcaccggaaattgatacagataaatcccgtaactccgtttacctaaccagttaaagaccggattcgtcaataaccgattccaatcagcgcctggatgagcgacaactgccactaaaacacagactaaagcactaaacagaaatagtcccccgcgatagacaagactactctcggcattcaacttaaccattaaccaaaccaaactgaggacactcactaacccgatgccatcgaggacgaggcgttgtttaggcacaatcttttgcttaagggctgttgatggccaaacaaacgccagcgctgctcctagtaaaattgaaaagacccgcgtatccgttccataatacaaacgactagggtcagcattgggttggtacaaaatggccatccagattgctgaaacaacactgactgctagtaatacttgggcaatccgatttttattcttaagaccaataatcaaggccacaacgataaaaggccaaattagatagaactgcccttcaatcgatagtgtccacagatgggtaaacggcgactcattattggcaaaccgatcgaaatacgactgaccatgtccaatttgccaccagttataaacgtataaaatgttcgtgataataatctgattaagttgctgtaacatttcccgctgaaaaagcgtgatgtacgcgcccgttgcaaacagcatcgttatcagcccagggtacaatcgttttacccggcgtaagtaaaaactttttaaattaatccattgattttgttcccactcttgaaccaataaatcggtgattagataccccgaaaccaccatgaagattgggacccctaaataaccaccggtaaaagtatatggcatcagatggtataaaataacaccaatcacgccgattgcgcgtaaaccatcaaagccagtaatgtaacgactattctttaaacgcttcttgcccgccattttttcaacctactctacattctaataactgctattataacaatattttagtgatgtgcctacattaagccctgttattttatgcatcccatagaaaaaggaagcattcaaaaatgaatgtcttcctttcttgacgtgcctattattcgacaaattcaaacgtaaagttatcaattgccactaaatcaccatcatgtgcgccactttcgcgtaaggcttcgtcaatccccattgaacgtaattgacgggcaaaacgcatgacaccatcttgatgatccaagttactcatcttgaagagtttttcaaccttgtcaccagacacaataaacgtgccgtattcatcttgttcaatgatgaaagcaggtgcttccggttgatattgataaagtttttgcgtttgaacttcttcgacgtctcccattgggaattcagtcgtttcagctaataagtcagctgtcttgttcatcaatgattgcaccccttgatgcgtgatacttgaaatttcaaaaatctcatgtgtatcgccggcagctgctaatttttgtttaaactcggctaataattcagaagaacctggtaaatccatcttagtcgctacaatcacttgtggtcgttctaagatttttggatcataggtctctaattcgtgattaatttgttggtaatcttcaaatgggtcgcgacccgtttgatcgtccatttcgattaaatgcaagacaacccgtgttcgttcaacgtgccgtaagaattgaatccctaaaccaacaccgtctgaagccccttcgattaaccccggtaaatcggctaagacaaagtcccgaccgtcatcgagttgcaccatccctaagttagggaccaacgttgtaaattggtaactagcaatcttaggtttcgcacttgtcaccactgacaacaacgttgatttcccaacagatgggaaaccaaccaacccaacatcagcaagcacttttaattcaagttgaatgctgcgttcttcaccaggttcaccgttttcggcaacttccggcgcactattacgggcatttgcgaaatgcatattcccacgaccaccacgaccgcccttagcaatcactaattgttggccatcttcggttaaatcaccgagtaattcattggtttcagcatcgcgcaccgttgtaccaggtggcacttgaacaaatgtatcctcggcaccgcggccgtacatttgtttattctgaccattaccaccactattggctttaaagtgatgacggtaacgaaagtccattaatgttcgtagaccttcatctaccactaaaatgacacttccgccccgaccaccatcgccaccggctggtccgccaagtggcacaaacttttcacggcgaaatgcaactgcaccatcgccgcctttaccagctttcacatcaattttgacttgatctacaaacatattttgactccttctcatcgttaaacagtaccttatatactaccgaaaaaaagattaaaagtaaacagataactggttaaacactgaattggctctatcatcgataaaaagcgcactgagtgagtgacctcaatcagtacgctttttattcgttaattaatggctagctggcaccaatttaaattggctccatggtttcaaatagtctaataggaataattctgtaggcgtaatacggccaaccacattcacgcgcccgtcatttggcatggctttgagggcaatttgggtttcccctttatactgaccgtaaccgacgttatcgattaaaatatcaccgcgttggatgtcaactgtatggtggactgggaaaggcaagtctttaaaaatgacccgtgtcatcgttgaccgtagaagatattctgaacgatcgccacgataactatgcagactttcaaagaggaccttgcgttcatcagccgtaatgtcatctgcgacgtcgattgcgattgctgggaattcagcgttaaaaacgtcatgtatcgtcttcaattctgcttccgaagcatacgcattaccgacaataatgtcatcaatgttatccattaaaacgtaatgtttcatctgcgttgccatcgttaaatcgcgatcaacttccatcgtgggcaacccatcttgtgttggccatggtccgaaagtcgcttcatgtgaattgacaaacgctgctgtattcaaattgtattttgcaaattgcgccgtacattgtttgaagaagtcttcacctaatcccgagaaccgatgtggatagaagttatgacaacctaacaagttttctcgtttgggtgaataactcataatgttatcaacgtaacttgtcccttgactcatattaatttcaatttttaaattaaacggattgcgcgtcatttccgcttcttcttggctggtaaaaccgttgtccaaccgaattccccaagcaccaagttcatggaaaaagcttaaattatcatatgaaataccgagttgcttgaacaaacccggattgatatcaatcatgacttgcattcctaattggttggcatgggctacaacccgtttaaagttgcctaacacggcttcttgatcgccagacacttccaataatgatgtaaagacgcgttggaacccatattgatgcgctaaatctaagtaagccgcatccttttcaaaagttgatcgttctggataaattgaaacgcctagttttcccatgaatagaacctcctaataattgggctataccactctgtcatctattagtctagcataccttaagcacttttgaaaactcttacattacttttaaactggtctatttctggcattgtccgcagtttgctcactaacgcaccaatctttttttaggtctatatcagcgttttgatggtttttgaacgtttttgaaatatttcgattgcttttgaatggaaacgatgtcataatgatgctacggaggttttgtcatgttaacagaagaacgtcaccaagcgatattacaacttttaaagcaacaagacgtcgttaagatgcaatctttgtgccagttattgaacgcttctgaatcaactgtccgtcgtgacttgcaattgctcgaagaacaagggcttgctactcgaattcacggtggtgctaagcgcatcaacacgttacaagaagaacttggccagattgaaaaaaacggcaagaacgttcatgaaaaaaacgcgattgctaagtttgccgcagcacaaatccaacaaggctgcgtcatttacttagatgccggcacaacgacccaggcaatcatcccctacttaagacctgaaatgaatttgacggtcgtcaccaatggggttgataccgcttctctcttagccgatcaccaaattcaaacctttctattaggtgggcgtgttaagagcaaaaccaaagcgatggtcggtgcggctgctttagaaacccttttgcaattccaattcaatcaggcgattcttggcacaaacggtatcgatgttgaagctgggctaaccacccctgatccagaagaagccactctaaagcgctttgcgattcaacaagcgaaccaaacgatggttttggcggatcacacaaaattcgacgctgtttcgttcagtaagtttgccccattggcacaagtccaattgattactgatcaattgtcaccatctgtttacaaacactatcattcacacacagaaatccaggaggttttatcttgatttatacgattacggcgaatccatcaatcgattacgtcattcaacttgaaaaactaaataccggtaacgtgaaccgcgtccaatctgacgttaagctccccggtggcaaagggattaacgtttcacgcatccttgccgaattagcattaccaagcgttgccctcggctttgtcggtggcttcactggtcaattcattcaaagcaaactcaacaacgcttcgatcgactgtcgattcactgaagtcgaagaagacacccggattaacgtgaagttaaaagacaatactgaagaaactgaaattaacggtcaaggcccacacatttcagcagaagccgttgccaacttgaaacaacaactggctaagctagaagctggcgatattgtcttcatgtctgggagtttgccacctaatttaccggctagtttctacaaagacttaatcccattgattcaagcgcacaacgctgaatttgtaattgatacaaccggtcaagctttgttagacacattggctgaaaaaccattggtcatcaaacccaaccatcacgaattggccgaactgttcgacacacactttgccaaccaaagtgaaatcatcgccgctggtcgcaaattattagaccaaggtgcccaacatgtcttggtctcaatggccggtgacggtgcccttttaatcacaccagaccacgcttacctcggtggtacacctaaagggacagtgattaattccgttggggctggtgattcaatgatcgccggttttgtcggcacattcgcacaacatcacgatgcactcgccgcttttaaaacaagtcttgcttgtggtagtgccaccgccttttctgaagatttagccactagcgctaagattaacgaactcttacctcaaattgaaatcacacaagttgattaattttaaatacaaaggagatttattatgaacatccaagatttactcttaaaagatgcgatgatcatggatttacaagcaacgactaaagaagccgctgttgatgaaatggttgcccgctataaagacatcggtgttatcacagatgacgccctctatcgtaaagatattttggctcgtgaagcccaatcatcaactggaattggcgaagggattgcaatgccccatgcaaaagacagtgccgttcaacgcgcaactgtgctattcgctaaaagtcaaaacggtgttgaatatgacgcactagacggccaacccgtttacttgttcttcatgattgccgctccagaaggcgctaacgatacgcatttacaagccttggctggtctttcatcccttttaatcaacccacaattagtcgctgatttgaaacaagcccaaacaccagaagacgtgcaaacgctctttgctaaggctcaagctgctaaagacgcagaagatgcgaaggaagaagctgaagaagccgctaaagtacaagccgcagccgcaacgccagctgatgatcaaaaaccattcatcgttgctgtcacagcctgcccaactgggattgcccacacttacatggccgaagctgccttgaaagaaacagctgctaaaatgggcatcgacattaaagttgaaacaaacggttctgaaggcgttaaacaccaattaaccgctgacgatattaaccgcgcaacaggggttatcatcgctgccgacaagaaagtcgatatgcctcgttttgatggtaaacatctcttgaaccgtcccgtgatcgacggcatcaagaaaccagctgaattgattcaaaaaacattggatgaagaaggctcaatctatcacgcaactgaaagccaatcaagcgaagaagcttcagctgacaagaaaaccctttggagtcgcatctaccaagatttaatgaatggtgtttcaaacatgttaccattcgttgtcggtggtgggatcttgatggccatctcattccttttggaacaaaccgttggcgcacattcaaccacttttattttcttgaactcattaggcaataatgcctttaacttcttaattccggtccttgctgcttacatcgcgatttcaatcggtgatcggcctgccttaatgcccggatttgtcgggggctacatggctagccaagcaacagccagtgtccttgcttcaaagagtccagccggattccttggcggtttagctgctgggttcatcgctggttgggtgatcgttggtttgaagaaagtcttcaagaacttgccacaaacccttgatggtttaaaaccaatcttaatattccctgtattaggactattgattgttggctttattatgtacttcatgatcaacccagtctttgctcaaattaacctctggttgagtaccttcttaacacacttaggggctggtaacgcattactacttggtgcgattttaggtggcatgatgtccgttgatatgggcggtcctttcaacaaggctgcttataccttcgcaatcggtgtcttcacaaccaccaaagatggttcattgatggccgctgtcatggctggtgggatggtcccaccattggcaatcgcggttgctgctactattttcaaaaacaaatttaccggtagtgaacggaaacaagccttcgcaaactatgtattagggatttcattcattactgaaggtgccattccatttgctgcatcagatccgttacacgtgattgtttcaagtgttatcggttcagcaatcggtggtggtttaacccaattatggcaaatcactgtccctgcaccacatggtgggatcttcgtggcaccacttgccaaccacggcctactctttgtgcttgccgtgttaatcggaacatttgtcagtgccctaatcttaggcctctggcgtccagtggcaaaagaagcttaatttaaaaagtcgtagtcaaatgactgcgactttttatttatcttgaaaatcagtattgtgcttttgtttccattcattaatgtaattcaaacgttgtttcatccgcgtttcattgccttgttcggtcggccggtaataaatatggtcggcgatactctctggtctagttggcatcgtggtcaatctatcatcgtagaaatgtgcgagttgatatcctttgccgtaaccgacttccttcatcaatttcgtcgccgcattacgcaagtgcaatggcacgggttcatcaatcgtctttttaatatccttttgcaccgctgtccgcgccttataagtggcgtttgatttcggcgcaagcgatagataaatcacgcactgtgttaaatgcacgtcgcattccggtaagccaatcgcctgacaagcttgaaagacgttcattgctaaattcaatgcattgttatcggccagaccaatgtcctcactcgcaaaacgaacgagccgccgagcaatataaatcgggtcttcgccgccgtcaatcatccgccccaaccaataaatcgctgagtcgacatcactattgcgcatcgacttatgcaaagccgaaataatattatagtgttcctcaccgtctttatcataataggcggtttttttatttagcagttcccccaatagatcgccatcgacggtcacttgatggtcttgcacatcactattaataactaacatttctaaaatattcagcgccgtccgtgcatccccattcgaaaagatggcgacttgcttcaataattcatcactgatatgaaccgttaaatccgggaaggcttggggcgcctttaaaacccgttgtagcaactcaataatgtccgcttccgtcaattgctttagcacaaaaacgcgtgaacgcgacagcaacgctgaattgatttcaaacgacggattttcggttgtcgcaccaattaggataatgctgcctttttcaacatacggtaaaaaagcatcctgttgcaccttgttaaaccggtgaatttcatcaataaagacaatcgtccgctcacccagttggcggttttcttcggcttcattcataatcttccgaatctctttgatcccattcatcgcggcactaaacgtgataaatttcgaagccgtcttgcgcgcgataatctccgccaacgtggtcttcccaacgccgggtggtccccagaaaatcatcgaagtcacttgatctttatcaatcatttcgcgtaaaaacttgcctggtccgactaaatgcttctgaccgacaaaactgtctaaatcagacggtcggacccgattagcaagcggcgcattcatcgccatctcttgatcaaacaaagaggtttgtcccattttttcaccccactttagttgttgttaattgaaacttcttaaaatgtgcccgtaaataacttaaggttaaactctccgcgtctgaggcaacaagctcaaatggtgcacccatcgccatcacttggcccccttgactaccaccttttaggccccaagtcgatcgggtaatcggcattggtcatcaaatcaaggtcgtgggtaatcatcataatggtggcacccttggattttagctggttgatgacgcctactaaggtttcaacatcgcgcggatgcaagccaacagaaggttcatcgaagacgaataaagtgcccgcccgttttttattcaaatgcgttgcgagttttaagcgctgtgcttcgccacccgaaagactcggtgtactttcaccaaggtgtaaataagctaagccaatttctttgagaatcttaagttccttttgaattgctggcacatctgcaaagaccgggattgcttcttccaccgataaagccaatagatcaacgatgctatagccttgccacttgatggcttcaatctctggtttgtagcggttaccatgacattctggacaggtttcttccatgtctggcaaatattgaatatccaaaataatgctgcctaacccaccacagttcggacaggcgccttctttattgttatacgaaaagtgcgcgatcccataatgatgcgcttgtgattctggtaaaccagcaaataatttccgcagattgttcatgatactcgtataagtcgcgagtgttgagcgtatattcttaccaaccggcttggcatcaatgctgacgactgacgttaaatcggtcgtcaactgggtgacctgctcgggtaattgctcatgttggtggtgcgcttcaattgctggcactaaactatctagaatcaaactcgtcttcccggcgccggaaaacccagaaaccgccgtaatttggttatctggcactttgattgtgacatcatgcagattaaaatattggccaaccgtcatcgttgtctgctcaccagtcgttgcggcagtgactttaggatataagatgttcgctcgaccagcgatatagtggccaatcagggactgtggattctggatcaaatccgcgggtttcccttgggcaatcacttgtccccctttgcgcccagcttctggcccaatttcaatcacccaatccgcttgactgatgatattcacttcatgatcaactaccactaacgaattgccttgtgccactagctgccggaaaatatgaattagcccttcgacgttgtcaggatgcagcccaatcgatggttcatctaaaacgtacaacacaccagttgtcgctgttcgcaacgtccgcgccaattgaatccgttgaagctcgccagttgacaatgtattcccattgcgcgacaacgttaaataatccaaccctaattctagtaacggttgcagtgtttctaataggttcttaaataaaattgtcgccatttgctgcatttcatccggtaagtcggccttagtagcacgcacccaatcttctaatgcgcctaacgtcaaattagaaactgctgcaatgttttgtccgccaactgtttgggtcagtaatgccggatttaaccgggtcccatgacacgttggacaggttgaaaaatggaaaaatgaattgactttagccattgcccgatcacttttaaccgattttagcgattcataaacagcgtcataagcattttcatagagggtattctccgtactaaacacacggcccgttgaggtatggaaatcaaccgcatacttcgcccgtttaccatgcaggacaatttctttttccttggccgtcaagtccttgtaagggacatcaattcggaccccaatgtgggcagcaacggttggcatgaaattccggcccggcaatcgccatgaggcaatcgctccgtcttcaatactgagattttcatccgcgatgattttgcgatcatctaacgtttgaatctgccccgtcccatgacattctgggcaggcgccagctgaattaaaggcaaagtcttcggccgatttagccataaactgcacttggcaagtagggcacgtaataatccccattttatcgccagctaagtccatcgcttgggcaatttttagacttggttgaatcacgtgcccatttggacaacgtgtcgtccctaaccgtgaaaaaatcaatctgacgacattaaaaatctcactcatcgaaccaacagttgaccgttctgatggcacacttggtcgttaccgaagtgcaatcgctgatggaatatgccgcacttcttggacttgtgagcgtttattctgcgtaattcggcgccgcgtgtacgtcgacaacgcctctaaataacgccgtgagccttctgcatataaaatccccatcgcaagcgaactttttcctgaaccagacggtcccgaaatcgccacaaattggttcaacggaatatcgacgttaatatttttcaagttattgacgttcccgccacgcacttcaatctacgttggttgttcaattgtcattattggttcgctccccttttgcttgacggttaaaaacggccgcctctgcttctaaattcgctaaaattcgttctaaatagccgtcaacagctgccacttcagcatccgaaaagcccttgtaaaaaacggcgctcaatcgttgactaacgtcatcaccgacctgttgctgattagcgccttgttcagttaagtcaaagacccgcttgcgcttatcaagtggcgattgctcactcatcaataatccctgttcttctaagcgccgtaacatcaacgataaactactattggctaagccagtcacttgtgccaattccgtagcagtttgcggatgatgatcccacaatgctgacaaaattttcccctgttcagcgttatagcacgcgcgtggatcagccgttaaataacgattaaaaagtcgggtatttaataagcgaatcttcaaagttaaataaccaccctttttggttttcatcccgtccactcctaaattgtttttatatcagcattaattatatcttactatataaaactaattttagcgagtaaaaaacaccatggtcaaccacggtgtttctaaagaagctgtttcaattgttctgcttggacactgcggacttcttcgactactactagcgcctgcttgtcaatcgttgagaccaccggtacgagcgtcgcgagttgtttggccgtacaaatgacatacagcatcggccggtcattttgactatagtacccttgcgctttaatgatcgtgatgccctggtggaattgcgtcgacaatgtttgggcaatcgttgcatattgatccgaaataatcgtcaccgcgcgttttgccccaaatttagccaataatttattcaaaacgactgctgataaatacaattcaataatcgttaagagcatattttggaagccgataatgaagccggatggaatggcgacaattaaatcaaaaaaaagcatcgcagagccgttttggatccctaaatagcgattggcaatcttcgctaagatcgtactaccagcaatcgtcccttggcaatgaataataatcgccattgcaatccccatcaagacgccaccaattatcgtcggaatgatcgtctgtgtcgtatggtagccgataaaatgcgggagccgcaagaagatagaaatccagagtaccgcccagaccgaataccagatggtttgcttctctaaatacttaaagccgacaatcactaataaaccgtttagaaccaaattcgtagcagctggcggaattgctaacgcatagtagccaatcgccgttaagccagtcacgccaccttcaccaatatgatgaggaatcaggaaatcattaatcgccaccgcataaatcaaggcgccaatgataatcccgagaccatttttaaaaagtgcttttttctgcatcccactcacgtcctcgttcaaactaacataagcgtaccatatttagggtgggagattaaagaacaattgattaactattaatttacaatactctatatttttcctgtgctaagaaaccatttacttactttagaacactctgccagtcattacttgaagcccatccattgtatatacttccacaatgtccctatcaacaatcagcaatacatcatcaacatttcctgtaatttgacgcctttcaattttcgatgttgcccattgacgtctttcaaaatataaccggtcctgatactttttcaagacagcattttgatagatttttattcgcgcgttttataattaagttagccaaatacttttagctaacttgataaaataaaaaacaccaagacaaatctctgttatcattgatgttcctacacaaacaatgaaagaggttattgtcttgatgcaagaacagaataccacagtcagaaaaaaggtcagcacctaacttcgtttgaacgaggcagaattgctacgctgcacagccaaggctattccaatcgtgcaattgccagagcgcttaatgtttgtcatcaaacaatcaataatgaattgtgccgcggcgagatcgaccaagtaaaaaaagtgaatggtcaacgccaatattacgctgtatactcaccagaaacagcacaagctaagtacgaagctaatcgagcccactgtcatcgacctttgaaactcgggccgaaaggtttaaccttttttgttaccatcagttttttccaagagagagtagtgattaacctgcagctattagctaatgagatacttagtgttactcaggatgtttacgtggcctataaagaaccctactagctgtgagtaggattaagctaagtaaaatataatatagcgcatcgtaattaaaaagccgtttaacagtcccttatgggatggttaaacggctttttgctatgctaaggcgtcattttctgtttcctgataacgttgcaagatgtagattgctaggataactagaattgcaccactcatttctacccaactaaagcgggcatggaagaagatgatacttagaataaatgtaattacaggttgtacggcatcaacgatactgattacggttgatggtgcaaagtttaaactgtgtaacaagcaaagatatgcgaatacagttccaatcaaaataacggctaaaattgcgataataccggaagcatttaaacgcggcggtgcttgccagaatggtcggtggatattgaagagtaaaccactgatgaacatgccccaacctaaaacgagaattggtgatttttcattaacgattggtcttggtagcacaacgtagaaagcagctgttacaccggataagattccccagattaatgaattaaaaggaattgttaaagtatggatattgcctttcgtaatagaaaggaaaacgccaattaaagcaattccgaatgagataatatcaattcgatttggccacttacgtaagaaagcgagggttccaataacgataaacagaggacttagatattgtaaaatagtcgccgctgctgcattccccgtttggatactcatgaagaaagtatattgattacccatgataccgaaaagggcgtaagcgattagccaagccgttaatcgttttgatttaaaaatggagaagatatcttgtttgaacttaattgccccgataagtaataaaattaaaccagcgccaagcgttctaacggataggaaccaagttgcagggatcttttgtccttgcgagatgaattccaaaatagtacctgaaacgccccagagtgcggacgccatagtcgcccaaaacatgcctttggcgatgttttgcggttgagttcgattgttcattgtgcgccatccttttttgaaaatttataactatactattataagctaaatggcgtatttatgctatttgcaaaacttttttcattattattccccacaaaataataaatatggcagtgataaagcgaactggtcaacaaaagctaattaagttatgatgaataaaaaagtgagggattcagatgcaatacattgcgttattacggggaattaatgtgggtggtaaacggccagttaaaatgagcgtgcttaaaactgcgtatgaagcggctgggttcaccaatgtgaaacatacatcaatagtggcaacgtgttatttgaagccccagaaacaggcttaacaaccttagcggcaacttgtgatcagattatggtggagacctttggcttttctgtgaatatcgccgtggtcacagctgaccagttgattcaagctgttgcggacgcaccaacttggtggggcaatatgccagatgtgaaacataatttaatcgtggcgattgcgcctaaaacgggggcggaattgagtgtacatgtaggggcaattaagccagcgtatgaaaaagttgccgtgaatggtccgtttattttctggagtgcacccgtgaaaacattcggtcggacgcggtggtcgactgttgctaaaggggacctataccagtggctgacaattcggaatgccaacaccgctcgtaaattagtggcactcgcacaggcactacgggaagcatgaagtggttagactcgcatcttcattaatattcatatatacttatagtaataatcaataaagaaatgagggacgcgatgcgcttatccaatttgaaacagacgattatccagatggggttgatcttgattgctctcgaaattattgcgattgggattcaactcttctttgccccccatgaagtagcagccggtggggcaaccggtgtggggatcttattagaagaattgatggggtggaagatatcaacagtggtgtttgtgattaacatcggcatgctgatacttgcttacttcttacttgataagaaaaccacgttaagaattctctttggtagttttatgctaccagtttgtttagctttaacgccccaaatgatggtggtggaagacaaactattagcaattattatcgggagtgttgtttacgctgccggaattgccttgttatatcgaattgatgcctcgagtggtggctcaacagtgccaccgttaattttcaaaaaatatttcaatattaaaccggcattgagtttgctggtagttgatttactagtctgctttgcgaatgtgttcgtctctggttttgagacgttcatgctggcaacttgttcatcaattctgacgttgattacgatgaactatattgagaccgggttgaaccggaaaaaggtcctctatgtcatgagtaacgaccaattacctgaaattaaagcccatttaatcgaagaatctgatgtgggcgtgacgatttttgatgttactgggggctattctaatgacaataagcagatgttgatgctcgttgttgaaaatcaagcctatcaacacattattaatcgaattcatgaagttgatcctttggcatttacgattgtggctaacgtagccgaggtacgcggcggtagtttataaatttaaaaagggtcgagacaattgtctcgacccttttgtgtgttattgatgattaaagtagcgatcagcttttaaattattgatggtgagcatgataatcaagctgatgatatagagtgttgaaatgaagagcatcacggtcatcaccgaataatgatcaagtaaccaaccgataatcacgctcgaaaatccaccgatacagcggccaacgttcataatcacgttattggcggttgcacggacttcggatgggtagaggcgactgacaatcgcgccatagcctgcaaacataccatttgagaagtagccgacaattgcaccgacgaacaataaagcacccatgctattggggaaggttaagatgtaaacgcctgctgctgaagtaatcaggaataagacaaaagcaaaccgtggaccaattcggtctagaatccaaccgaaagtcaacatgcctgctgacatcccggcaatcgtcgctaacatccaagttgatgaaccagccacactgaggtgcatttgttgttgcatgatggttggtaaccagttcattaaaccgaagtaaccagcgatttggacgattgccattatcatcagcgcaactgtttggtaagctagttcgcgtgttttaaaaagagcgctaatctgaccttttggttgatctgattcagaagtgaacgttgtactttcgactagatgatggcggataaaaaaagtaatgataacaggtaataggccgaatagaaatagtgcatgccaaccaaattgtggtaagacccacgctgctagaagtgccgcggcaatagcgccaagttgacctgcgacacccacgaaggatgaaacacgtccgagctgtttcttagggaaagattcggctaagaccgtcatgccaatcccatattcgccaccagcaccgatcccagctaagaagcgacagagataaatcatgggaagggtgtgggcaaatgacatagccgctgtcgcaaaagcaaagataaaaatggtgtaagtgaatgttttaatccgtccaacgcggtcggctaaaacgccaaaaaaaacgccacctaacaacattccaatattggtaatcgttgcgattaatcccgcctgtgttccactgagatgtaaatctgcaatgatggacgatagggtgaaagacaagaacataacgtccatgttttcgagaccgaagccggccgttgttgaggcgaccaccttagtctggtagcttgttaatcgatgttggctgtgtgccgtaatagttttcatattcagttttcctccaaaaaggacgctctctgtcgtcccttattttgcttggtgccaatcttagcacaggaaagtagtctgtgcaagggtgttatggaaaaagcgcaagcgtcctttgtgatataattgagtttataaaatggctcttcagcgatggagggcgtcatggaggctattgaatgactgataagaaaaaacactttacttttccgagcgcctacacagtaattctacttgttttactggcagtgatgatcttgacgtactttatgccagccggaaaatatgcgagtttacaatataacacgacccaggaaaacttcactgtggtcacacccaatgggcatgaatcgacagcacctgggacacaagcaacactgaagaaataccatgttaatacggatttagcgaagtttaaggatggatcggtgtataaaccagttgcgattccaaatacatatcaaaaactcaatcaacataaaccaaacttatttggcgcgattaaacaatttctgaacgcacccattcaagggttatctgaaacaatcgatattatcacatttgtcttaattctaggtgggattgtgggcgttgtgaataagaccggtgcatttgcggccggaatggcggcgctatcgaaacgtttgaaaggtaaagaagcctggttaatcgtgattgtaacgagcttgattgccctaggcgggaccacctttggcttggctgaagaaacaattgctttctatccaattctagtgccaatctttatggcagctggctacgatgcgctagtcgcaattgcggcgatttatctaggcagttcaatcgggacaatggcttcaacggtgaacccattttccgtcgtgattgcttctaatacggctggcattagctttacagatggtatgggactaaggcttgtaatgctgattctaggcacattaatctgtattttctacacgattcggtatgctgaaaaagtaaaacaggatccaagccaatcgctcatttataatcaaaaagcagaattggaaaaacatttcctgggaaatagtgatgtcaatgaagtaccacggtttgatttccggaagaaattgatgttaattatttttgcggccggttttgtcatcatggtcttcggcgtgaaggaatggggttggctatttaatgaaatttcctcgttattcttagcgattacgtttattttggcgtttatttccggattatcggaaaaagattttgttagtgaattcgttgcaggggcttccgacctgttaggtgtagcccttgtgattgctttagcacgcggcgtgacgattattatggaacaggcacaaattagtgatacgctattgtactggttaagtagtggcgtttcccatatgagtggtgttatcttctcaacggtgatgttcttcgttttcattctactaggattcttcattccgtcgagttccggtctagcggtgctatcaatgcccgtcatggcaccgttggctgatgtagtcggtgttaatcgtgacgttattattagtgcttataactggggacaaggcattatgtcgtttatcacaccaactggtttggtcttggcctcgctggcaatggtccatgtaacgtttgataagtggttaaaattcgtttggccattaatggcgattattggtctattagcaattattttactcggtgttagtgtctatctttaaaaaaacggtcaaaaaaggtccgccacaatcgtggtggaccttttttcgtgattagtaaactttaaatttcgttactggccagtagcggagtttgacaacgccttgaatcccgttgaaggttttagaatcatcactgacaaagcctacttcttcataccggctatcctttgaaacagtccggttatcacccatgacgaagtagtggtgggcagggactgtggaacgaccaagcacgtcctttaaatcaaagtttggcttattagtctttgggttgagtgtgaagtagtttgacccggctaggaaggttgttggatcttttttatagtcatttaaataaggctcactgacttttttattattaatatagagttgatccttgttgaagcgaacagtttcaccgggcatgccgacaattcgtttaatgtagaattcacctggtgaatcaggggccttgacgataacgacgtcgccgcgtttcagtttcgtatggcgtagtgcaatgacccgatcatactgtgtaaagttgggttgcattgatggcccgaaaatttgttcattggcaatgacgaatttgagcagtaattgcgcaatgccgaccatcacggccgctaataaaatgatttgtatagtggatttccaaaattcttttgctttagctgacatatcgcacatccttagaattcaatagattcattgtactacaattaattggtagatgacaacgaaactgtacagttccttaactatttaaatgatcttttaaattagggaaatgacgcgttatttatcacgggaaacggttcgtggtatactgaaagggattattttaaacgacaggaaaagtgagtttaacgcatggcgaatttagtaattgtacgacatggcgagagtttagccaatcaattaaatacttacactggttggtctgatgtgccattaacggctgctgggcgcaaacaagcacagcatgtgggccgacaaattcaagcaaccggaattcaattcagtcatgtgcatacttcgttattgaagcgtgcaattttgacgagttacattattctggatgaaatagaccaattggccattccaatgacgaagagttggcgattaaatgagcgccattatggggcattgcgcgggttaaataaggaaaagacgcgggctatttttggtgcgcatcaagttgcccgctggcggcgtagttacacggcggtcccacctttattgacgactttttcgcaggcccgtcgttatcgactagttccaccgatgagtcggccacgcggggagagtcttgcacaggcaacgcaacggctattaccttattggcaagatcaagtagtgccaggattacttgcaggccaggaccaattgattgtagcgcatggttctactttgcgtgcgctcattaaggtgatcgaacagatttcagatcgcgatattgatggtgtggaagttgaaaatggtgaagcactgtattatcgattcgatgctcaaatggtagtcattgagaagggacgattagcggactaagcggatggacaacaaattgaaaagaggactgctgttggtagggctcatcctactaattattggcggcacgatttatcatgaacggcaaaaatatgccgtccaaactcaacaaacccaacaaaaaatgaaacaacttcagcaacaattacaggcaacaaaacttgagttagccattcaaaaggcaaaaagtcatgaagccgggattgatgatcgaaccatcaatcatttgagtgcgaaggaacaacaatttgtacagcagttgctacatgataacagttttagcgggaccattttaattgtgcggtggaatcatgtgttatttcaaggtggccggggctatgcaaattttgcgactaagcaactgaattctccacagacgacgtatcagattgcatcgattcaaaagtcattaacggctgcgttattgatgaaacaggtgcaagccgggaacatcgatttagcgacaccgttaagtcggtattacccgcagattaaagaggcggatcaaattacgctgaagatgatggttgatatgcgttctggactgactgaattatctgcaccagaaaaagaattatcagatcaagcgcggattcaatatgcgcttgatcatttggctgttaaagatattggtcagcataattattcgccagttaattaccttcttttggccgggattttagaacaagtcacccataagagttatcgagagttagttggaaatcagttgataataccgtttaaattaacatcgtttaattttatgccaaatgaaacgaccggccaacaagcgactgcttatggttatcaacaagacggctatggcacgccagttagtgaaccaagttacgtatatatgcgtgagttagggaccggaaatatgtatgccacaacgagtagcctctttcgaactgaacaggcgattgttcaaggaaaagtttttaaaaaatcgttattaaaaacgctccgctcatcgactactggtgaatatacgggtggtgtttataattacaaagattattttacaagccacggagtcgaatctggattcgaatctagcttgcagatgagtcaggatgggcgttcaggaattgtcttattatcgaatcaatataaggccaatccttcaatcggacttctaacgaatcaactttataagcagttaattacgctcaatcgttaaaaaagcagcttggcttaatgcctagctgctttttgtttggactgtaaaatgatgttgtgcaagtgtccaaaggccaaacccaattaaacagccaaaccagtttaagaggatatcactgagtgcgaaagtccctagataaaaggcgaattggagaatctcaatgcctagaatcgttaagagcgctatgatgttcgtttcaacaaatgaggctttcaaatggtacaaaccgcctaatgggatgaagtaaacgacattcagtgcggcttcgagcagtgttttgtgatccttttgaatgaaatcgaacgggttcaagctaactgcatgatagacgtttgctttagtgaataagacaatgaataataagagcagatagacgctgtagacgagataaccatagattggcgatagttgtcggcggtcccattgcacccagcccaaccaaaatgtaagggttaaaaatagaatcagaaaaagcgtcgttgctggaaaacgggccataacccgggttaagcgtggataactgttgagtgttggtaagacaatgtgccacacgaagtagcgacttatgaggtaggcgaccacaccggctaaaccatattcaagtatcttgcgcattacgattcctccagtgattatagtttggtttgggcgaggcgtttagtgaattcagccataaagtcaaaatgttgtgtgtcggctaacgtatcttctaatttatttagaagttcgttgagcgcttgttgttcgtcgggggttaggctaccgaataaagtctccgtaaattcattgcgaccatcgagggcttcttttaaaaccgctcgaccggccgctgtaatgaagacgtgggtgattcgccgatcatgatgatcgggccgccgattaatgtagtgtttagactctaatttgtgcaagcattcggttagggatgaaggccgaatatcgagactttcggcgagggctccctgcatttgtccgttttcgatattaaggcgttttagaatgcgaatttggctgactgagcgatgatcggatgaaaattgcatgccataataatggcgataatggtgaatcaccttattgaaagtttggaaaagctcgttagatagctcggtcatggggactccttaataaagtttaatttgagatgctaatacgggtataatacgtcatttcataaggtggagcaatattgctcaggttttatcaagggtgttgtgaataattttacataataaccgcaaaaaaaacgatggttaaactgagtcagttctaaccatcgttttggggttgttattgagctgcttttaagaaatttaatgcagctgcataatctggttcgtctgtttgttcgataattaattcggtgtagctaattgtaccatctgcttccaaaataaagattgagcgttgaagcgtgttgttgcttggaacgtagagttgcattgttttcccgaaactgagtgcctcatcagaaaggagttgcatgttcttaacgccttctgcagcgcaccagttattttgttgttcgatggtgtttgttgaaattgtgtagaaatggacgtcttcgaattgatcgacggcttggttaaaatgctttgtttgaatgctgcaaacacgggtgtcaatgtctggcacgacgctaattaaagtccgtttaccgagcaattgcgcagaagtcaccgtttcgccagcggcatttttaaggtcaaattggggtaactgtgtgccgacggctggtggtgtgccgattgtatcgagtggttgatcatgtcttgtgatttgcatttgcataaacctcatttcataataaaagatgcttttattctaagctgattgtgctgagaacacaattaatcacgctcgaggagtatagaaaatgttacgtaaaaaaattcaagccttatacgctaaaaagatgctgaaccaaattatcaaagaggtcaatgtcaaaccgctcgtttatgaaattgtcgatgcaagtgggactgaaaccgcggttttgctaagtcatgagcaatgggtcaaaatccaagccgcgttaaccgctaacaagtagcgtgaattcccgatttagacttaatacggtaactaagctgtaacatttctgtaatagttgaatgttacacttgttcttggttggaaaaccgtacataagttaagtatttttaaaaatgataaaggggaatcattcagtgaaaaaagtcagtcgattaatgttcagtgcactagcattcttaacaattgggtcaacaatggcggttagcattggtgcagtcagtgccgatgaagttgctgatacaaaagcatcaatgacaaaccttagtgctgaaaactcggctttattagctaagttaagtgctgcacaagataaggttgcttcaatcgatagccaagtgtcaaataagaccgttgcaattgatgatgcacaaaagaacattgcatcaacggacaaagaaattactgaagtggctcaaaaaatcgttaaagttcaagctgaagtccaatctagaaaagctgttttaaaagaacaagtaattgcgcttcaaaaacgtgctggggatagtgtttctggaaatgtttacgttgacttcatcgtcaatagtgatagtttctcagatatggtcagtcgtgcttcagttgttggcaagttaaaccaagctaacaaggaagcaatggacgccgtagcgaactcagaaagtaaattagctactttaaaacaagaacaagtgactaaaaaagcaaacttagttaacacaaaagcacagttagaaaaagatcaagcacagttaacatcacttaaagcagatgcagaaaatgaacaagcaagtttccaacaagaagtggatggacataagacacagcttgctagcttacaaagtcaattagatgctcaaacagcagccgctgttgaagctgctaaaaaagaaactgaaaaagcaacaatcgcaccaacggttgcacctaaaacaggttcagacaatacaccagcaccaacgcctgcaaaaacaacgacagttgcgccatctggtgcaaacactggttcattagttggcaatgccttacaattcattggcacaccgtatgcatggggtggcgcacaacctggtggttttgattgttctggtttagtttggtacgctgctaagatggccggcattagcttaccacggacatcacaagaacaaagcacggttgggacaaaagtgtcattatcagaattacaacctggtgaccttgttttctggggtggcgttggttcagcacatcacgttgggatctatatcggtggtggctcatacgttcacgcaccaacagaaggccaaaatgtaacaacgatgtcaatgcaatattacaaacctgactttggtcgtcgtttataagattaaataaaagaataaaaaagtttggcgtctgcttaaattaagccgccaaacttttttatttatttaaatcctgaatagaagagtgtgaatgaatagtgacaaaacaactattagtcattacgggcgccacgggtagtggcaaaacaacggtgagccattatttaaaagaggcctttcaaattccacaagtggttacccataccacgcggcctagacggcataatgaagtcgacggggtggattattattttgaaacaccagacaccttggcacaaaagcacctcgttgaatcggtgagctattctggctatcaatatggctcttcacatgaagcgttagatttggcgtggcaaaaagcacagctgattagcctagttgttgataccaaaggggcacagacttatttagagacgttccccgaagaagcatcggtcttgttcttaacggtttctgaaacagatgcgttgattacgcgccttgaaaaacggaaggatagtcctgaagcaattcaaaaacggattcaaagtgctgaatttaagcgggatctgatgttaccgagtcatttaaatcaacgggcaactgtgttggttaacgatgactgggaaacaactaagcaagccttagcaacattaatcgcaaccctaaaaaattgatcattgaaaataaaaaggaagcctgtcgaacgcgttcgacaggcttccttttaacgtatggttaacccttatgcaaatgagtgttggttaaccgaattggttcgtttcactttataactgagtttttgtacggcttgttcaattgtaataccacttgcgctgattttttcattgttcgttgcagttgcgataaatttttgagtttgcgtatcaagtgaaacatgataccaattattagtttgactagtaaattccatcgtaaaatctcccttcaaatgactataaatactgatagaaggctaatgaagacgatttcttaaaaatcatctgaattacatcataacgcgcatcctgagataatgcaactattttgtattcggattcattaaaatttggtgaaatttagttgtgcttagctaacggttatgggattaagggtataatggtaaatagtgtggggtaacaactaaattgaagttggtagtaacaagcgccagcgcctgacaacctagaaagcatgtgctagaatggcgtatcgattaatcgagaggagcggatgtattaaatgagcgaaataaccactgccattgccgtattacgcgcaaatgggtacaaaattaccaagcaacgccgagagatgctacagtatttatcgggatatgaaaatcgctacattcccgtgactcaaatcgacgagcatatgcgcgccatttttccgggaatgagtcacaatacgatttatcgcaacattaaagattttgaacaacttggcttagtagaacaacaaacagagggtgaacaggcccacgttaaatatcaatgcgattttgaacatcgccaccatcatcactttatttgccgccagtgtggcaaagtgattgaattgaaaatgtgtccgttagatttttttagtcagcaaattccaaattgtcaaattgaaggtcatcagttcgaactctatggcctctgtgaagactgccaagcataatagaaagggagcgttaaaatggcatatcacacaccacccattattccaccagccgccattatttcgttaattatcgcaatgagtgcgaccaacattgtggcaaatacggttaaacctgttgaaaacaccaagacagagcagtcgtcatttgtttcaagtagtagtgcaaccacaggttcaaccagcagcatgaatacatcagaaccagaatctgagtctgaatcggaatcctcatcgacctctgaatcaaccgttaattcctcttctaaggctgtttcaagtcaggatcggacggatacggatgccaactcacaatcatctgatgatgagcagacaacaacaccacaaaatgatgagtcagctaacacgaccacggcaagcagtagctctgctaacacaagtagtagcgctaaagtggtttcaagtagtagcagtgccactgctacgcagtaataatttgttttacgcgcaataagggggacatttatcgtgttaacttttttagacattattaaccattatttcggttacttaaatattaatggtcgcgttaaaaatcgccttttttcagttatttgtttaattggtgatttttatcttctatataagagtgtgacctactttaaagctcaagcggttggacgaggtgtgattaacctcctcgtctttttggtgttattctattttgcagtgatgaacctgtatttctattatcggggcaaaaatgcggtcatcgatatttcaccgtatgttgaaaaagcgctgggtggtgatccaaacgcgccacatccactaaatggggtaaccgccaaaacgcaagtgatctcacaaattcaaccggccactggcttatttgaagaacaaaatctcttgcccgcgcaactgacaatggacgcggaacaaacccaacgtttaggatccttgattaacgaactgattgaatctggctatcttagcttgaattacgcaggcttaagtgataatgatatatatgaacaagcgcaacaattgcagcgaccaatttatgcgattgggaatcaagttgctttaccgttttatgaaatgaaacaagaagcagatcgttgggtactctatggggggattaacgccattgccaaacaaccgttagcgcagattacgacggttggcttaaccccaatccaagacctagcccaagattatcaacttgcagtcgcccatacttggattacgggtggcccgaacaagatggccgggcgtagtggcgtggttgaaggcaatgatccctatcaattagtggttcagattgcgtaccaagaacgaacaaagtagtcagtggaggaaaataggtggagattcataacgaattcttagatgtcaattattgttaccaatactacctactagaattagtagcggataacggcaattattacttaacagggtagattgtaccggttgtttcggaaaagataaaaaaatactcctatgtagaggagaaggccattttccgcaagcataatggttggaataaccattgcgagattggcagcaaacatcattgtcttagggttagcaattagaccaagcgccaataatgataagaggataggagcaataattgccagtccaccaagcaaaatttgtttggaatggtgcgtgcggcgaccgacactaatttcttgaatcccatacattgctaaaacggcaatgtataaatcggtaaaaatattgtttgacagtgcgaggttaccgacttcgaagaagtgttggacaatggggcttcccaagttcataatccaaaaaccaacgagtaattggaacatgtaacgtttttgattccgcgtatgtatgaatccttcaactgccataaagaagaagatggtggcaactggtcgtccgaaccaatcaacccagccagggaccccagccccggcgaacatttggtgcacgtgatcaataaacatgaggataattccaattaccttgacgtcgaagttatttaaaacttgatatgatttagtctgcataatagcctccctaaaagttaagtaagtacattatcgtatgtttagctcatattattaagttttaaatggctagtgacaataatgttagatagcaaaaaccacgataaaaggaatttatcgtggttctgagcttatttagcaatttggcttgtgccatctgcgtaatttaatgtaacgccgtcttggacgttaaaaatgtaagtgttaaattgaatgctgttatccccgacggattggccttccatttgaacgccgcgggctagcagctcattatcgttaaaaataggtgtgacacggtaacgaacaaaacgattagggtgttttttgagataataagcaatatctgattcatgggccagcatttcgggtgcgtttagctggcgtgttcctgtcatcagattctttggattattattttcaccggttagttgatagccaattaaatgactccgattatacagccagccagatttaatccgcttattatgccaaccggtcggattccaagtgagtccttcgcgcttggcagtaggcatcatcgattgatttaaaagaacatttgcagcaccaacgcgatttagtgcgtcgagattactaaaggtttgccaaccaccgtgatcggtagccaaatcagtagcactgaagcttggttggttattattgacgagtacctcgttttcaccacggtaggtgagggccgcgagctctgatgtgttatgacgctcaggactagtcgtttgcatttgttgctgataattagtgagttttttgtttaactggttaattttacgttgaagcgcattaatttgacgttcggtttttttgttgtgcgcattaatgcgcttggtttcttgacgtaaggtggtagcgtgaacggtagttggttgttgcaaaagggttccgacaccagcaagtgaaattgttaccaccacgcgacttatcaaacgggttgctttcattggctaatcctcccatccgcaaagggtatagccttctgcttgtgcttgtgacaatggcatggttgtagtactgttggcacgacttaagccacggcaattgggatcaagatggtattttttaccagaattaggggcaattgtcaccatttgttcaacttgttgagcactagcagcttgttgtgcttgttggcttgcctgaattgcagcctgttgctgagcggcctcgctagcttgactagtagcggcgattgaggctgaagccgcacggactctttctgactcagacgctttttgctgctttttaacaagtcgtgattgactggcaacttgttttgtcagttggctagcctctgttttctttgtagctagttgtttttttaaagcgctcgagttagcacgggccgccttgttttcgcgtacatcaacttgatgttggctggtcttcttggaattcgcagcagccaccggcattaatgaaccgcctaagccgattaaggcgatgatgataatcagtacgcgacgccattttctgggtcgttgccggttaaagaatagtagtgaaatcagtgcgctccccaagaacgctaaaaataaataggacataataacctccaaagtaatgaataacagttcttaacgattgtatattgtacataatatgaaagcaattataaaaagcctaggcgtacctaggcttttagcggttaatctttggttgtgagtgaaacaattgcttttgtttgatagtatttttcaggattggtttcaaaagttaaccaatctgcatcagcgaatagaccagccaatgcaagaattgggcgttctttagcgagttgttgttcgctagaagttgcaatggcgtcttggtagctaccattgaagatttcatctagataaaaggcttgatcatcaccaacgtttaaataggtagtatcattcttccaagcatgtagcaaatccgtttccgaaaaagtaacggtttcgttatttgaaaaagtcatgataaattgcatatgggtcaactccaatcaattaattaagcaacaatctatttggttgcctgcctaaattatagcatttagataataaaaggcgaaccttttgacagtcattgtggttaaaaagtagaatgaaggtgaacaaaatagaaaggaagtcattgatatggcaaacgaagaacgattagatagtttgaaaaatgtaattgaaggcacagttaagaaggttgtcagtgaagtgacacctaataaagataagaaagaaaaggcgcaaaaagctgacaaaaaataggacttagtaatgaagtaaaggtcaaaatcatccgtttggttttggcttttttattggaaagccgttaaatgcgttcgcttttacgaggcaggcttggtataatttaaaggatagtcagaggaagtaggtacaattaatggattacgcagaaatgttagaccggcaaaagcacattcgtaatttttcgatcatcgcgcatattgatcatggtaaatcaacattagctgatcggattctcgagatgacggatactattgccaagcgcgatatgcaagcgcaagtcttagatgacatggaattagaacgtgaacgtgggattaccatcaagttaaacgcggtggaattacactaccatgccaaagatggcgaaacttatattttccatttaatcgatacacctggacacgtcgatttttcatacgaagtgtcacgaagtttggcagcttgcgaaggcgccttattagtcgtcgatgcggcccaaggggttgaagcacaaacgttagccaacgtttatttagcggtcgacgatgatttagaaatcgtccctgtcattaataaaatcgatttaccatctgcacaaccagacgttgttaaagcagaaatcgaagagatgattggtttggatgcttcagaagccgtgcttgctagtgctaagagcgggattgggattgaagaaatcctagaaaaactggtaacggacgtgccagcaccaacgggtgatttaaaagcaccattgaaggcgctgatttttgattcgatctacgatagttatcggggtgttgtgttaaacgtgcgggtttttgatggcactgttaaagtcggcgataagattcgcttgatgaataacgggaaagaattcgaagtcactgaagtcggtgtgatgtcgcctaaagccgttaaacgcgacttcttaatggttggtgatgtgggttatattacggccagcatcaagaccattcaagatacgcgggttggggatacggtcacccttgctgacaatccggcagcagaagcccttgatggttatcggcatattcaaccaatggtttattctgggatgtatcccgtggataacgcgaagtttaacgacttgcgtgaagcccttgaaaaattacaattaaatgatgccgcgttggaattcgaacctgaatcgtcacaagcattgggctttgggttccgttgtggcttcttaggcctcttgcatatggatgtcgtacaagaacggcttgaacgggaattcaatcttgacctgatcatgaccgcaccatcagtggattatcatgtcgatttaaccgacggcacagaagaagtgattgataacccatcagaaatgccagaaacatcaaatatttcagaagttaaagaaccgtacgttaaagcatctatcatggtaccgaacgattatgtgggggctgtgatggaacttgcacaacgtaaacgcggcgaattcgtcacgatggattacttagatacctatcgggttaatgtcatctacaacatgccactgtctgaaatcattttcgatttcttcgatgacttgaagtccaataccaagggttatgcctcattcgattatgaagtgactggctatcgtgcgagtgatctggtgaagatggatattctattgaacggtgaatccgttgatgccttgagttttatcgtgcaccgtgactttgcctttgaacgaggcaaagcgattgttggtaagttgaaagaaaccattccacgtcaacaattcgaagtgccgattcaagcagctatcgggaataaagtgattgcccgttcaacagtcaaggcctaccggaaaaacgtgctcgccaagtgttatggtggggatattacccggaagcgtaagttgttagaaaaacaaaaagccggtaagaaacggatgaaatccgtgggttcggtggaagtcccacaagaggcgttcatgtccattttgaagatgaatgatgaagataccaaaggtaaataaaaaaataaaagcgtgctagtcgaggctgactagcacgcttttttgcgttattgaaaagaaataacagttttaccaacacgttaatggatagcgattgagacgagcaggatgtttggtccctataaaaagccgctccagaaagctattcatgctgcgcgctgttgatgggtgcaaataacttaatgcaatataatgcgctaagtccaacaaggacatatacgatgcgcgaaataatagctgcttgaccgccaaataacatagcgactaggtcgaatttgaatagaccgacaagtagccagttcaaaccaccaacgattaataaagtaagcgcgatattgtctaaggttttcatagtgacacctcctttagtagttaatataacatcctcaaaggtggggaacaataaaattgcttagaccaagttttgtaacttagcaaagaattaagggtggttttttagaagatagattgcaaaaaaagcatgctagtcaaatttgactggcatgctttttggtgtttattgaagcatatcgattagtttcagaaagatcatcatcacgaggatgctgacccaaaagagcacattcgatttcttcttaagttggtcatttttcttttgttgggcgatgaataagatgactgatgaacttaagacgccgattgcagcaatgatcacgatcaataataaaatgagatgttgagcaggtgacatgatgaggctcctttaactgattgattctaaggagcagtataccaaaaaaatggagggacgagaatagtgaatctacctgatgaagcattaactcttggtaagatacatcgtttttaattggttgagatccgccttagtcaaacccagcccgtgtttcaaataaccattaacgccaccatattctttgttcattgtgtcatatgcggcctgtagataggggttacggacggccatcattgcagtgatcgttttaacggctttggggttattgtgagttgccaccttaatttgttcaattgtcttttcattttcggcgcggcgatatttattagaggcgaggtagtcgtccatgatgctcttttgatcaaccccgagggcactgaggactaacatagtaccgaatccggcacgatctttaccggctgtacaatgccaaagtgtcgcaccacttttattattcaataagacattaaagaactgtttatagttcgtgcgtgctgcgggatcagtaaccaatttttggttaatatcaatcatgaaagcttcaccatcaaccttatcgagattcttgaaaaagtcagcttgacttgccgaagtccctaaagacttggtgacatcatagtgattgtagtggacgttgcttaaagcgggatcgggtttagccgcaacttcgctactagtccgtaaatcaacgatgttatttaattgttttccaacggttaacttctgtttatccttcgttgttaaaccagctaattcaccagaacgaattaaccgattggctttaattttggtacctgttttcgtgacaattccacctagatcacgagtattaatcgcaccggctaattgaatgtggcgactcatgttttgtttagggacaaggttggattgatgagctgtcgattgtttagtatttttttgtggggtacagccggctgccaaaagtaataaagttgttgttgccacgtaagggatgattgtttggctcatgcgcatattgattgcttcttgtaaaacgattttttattctttacaaggttaagcataaacaaataatgtaaagtgtttgttgttctagtgaaaataaagtgtaaagcttcgtaatggtttggtaaattcataaaaaaaggcctagtagtggtttaatgatacaatggggttaacttttagatatggaggatgataagatgcatgcaacgcaactattaagtgcaacggtcgaacgcgctcaagaacgattactcgatacattggaacaaatgacagtggctgaggccaatacaatgccgcagccactaattaaatcggtgacctggttagtatggcatactgcccgtgaaatggattatcagattgcggatttgaaagggatacaaccattgtggatacgtgcaggttggtcacaaaaatttgcattagatctacccgatgaaacgcaagattggtcgcattcaccagaagaagcagccaaagtgattatcatcgataaagcattattaattggttacttagcagacgcattgcaattgacgcttgattacctggctgaagttactgacgagtctttattagagataattgatgaaaattggacaccggcagttacccgtgaagcacgcttagtctcaatcgtggatgatgcggtcatgcattccgggcaagctgtttacactagaagaatggtaatggggaaataactgctaggacaggattggaatcggtttaacgaataattagtgaagggtaaaaatagataccgtatggtatctattttttgttatccggcaattgaattgcgtgctactatattaaatgtaattaataataatttggaggaattatcaatgaagacaaaattattttcagtattagcaacaatggtagcaccaacagcaatgacagtggggtcagtatcagctgacgcagttgctccgcaaacatcaaaagccgactttagtgttgttgctaaggatccaacaaacccaacagatcctgaaaatgggacattagtattaaaatcagtaccaagtttcagctttgggacaattgaagctagtgagatttatgctggttttactggtaaagttgctaaaacagctggcgctttagaaattgctgatatacgtttaggcaaatctgactggtcgttgacagctgacatggctcaattcacagatgatgctaataaactaacaggcgcaatattgaatttagattctactggttcacttggtgaaactttaacaggtgctgttaaggacgattctcctgccgttgaagtggttaaaggtaacgggaaacatggtgtcgataatttcaagatggaagcagctacgttaacattagcagcaaatccagcagccgatttagctaaagatgagagtttcacaacaacaattaattggaatctttcatcaacaacaccaactgcaccaactgcttaatcattttactattaaacgcacgaaataagtgaataaagttaacgaagcgattgatgaggggcaggcaaagtgatttgcccaccccttatttttataggaggctacaaagttgttgaaaaagaaaagtttagtttcattgttgagtttaatatgtttattggttgggattggtagcttcacgcagaacgtacacgctgaaggcgctgaatttactgttacagcccaatatcgtaccggccaaacggacgctagtttggaatatttttcaattaaagctgaaaagggacagtcatatcctatcacagtcaatgtgcagaacctaaatacacaggaagcaaatgattttgacgcaaaactggtagctgcttcaacttcaaataacgggacgattgactacacaccatctcaccaaaagatggtcaaaacaaaagcaccgttgttacctgatttagcccctaaagtcgagcgcaaacaaagtttcacgttggctcccggggcttcaagggagatcacttttaatcttaagatccccgataaaggtttcaggggcacccttttagggagtgtttatgttaaaagaacctctaatcacgaagctcaaaagaagggctttgggattaataacagttttgcaatgacggttccagcattgctttcacaaaattttgacaagaacattacgcctaagttatcggtgacaatggcaaaattggaagcaaatggtggtgtaccgaaagttgtcgggcaaattgcgaatagcgaaccaaccatgtttggcaaaattaagctaaatgcgtgggtgacaaaaaagaatcagacaaagaaactctatcaaaagagtgctaataaattatccatggcaccacgctcaacatttgaatatgcaattgatacaaataatcagattttacccaaaggtcagtatacgtatcatgtgaaaatggtttcgggggaaaaaactttcagtttaaaacgcaactttacggttgatggagcagctcgtgaacaggtcaataagacattgattaatccagaaaaaccaggcattaattggtggctatgggggtctttaggaattttactactgctagtaattgctttaatcgcctatctgactggtcgaaaaaggggtgcaggagaacatgacgcataatttattgaaacgtaaccgaattctagttttaatgttagcaattatggttattatattggggataacagtaaagccgacccatgcctcctcagtttatggggggcaaagtgagattagctttactgtgcatatcgatcactcaaaaccgacactcccagatgttggcgttgcacaacctgatattccaaagaatggtcaagtaattcgttatacacctgatggacaagccacaacgactggtcgattaccacagactagtgtgctaaaaagtccatttctcagtttgttaggtatcgcaatcattctattagttattatgtggcgctaccaacaacgtgtcagaagggagacgcaagatgatgcaaagtaagcgtctaatttatgtaagtttagcaatattgttattggggagtagtttcgttagtggtccagcccaagtgatggcggctgaatcagcggcgagtgcatctgttcaatcaagtacgccgacaactgacgcagcatcgacgacagagcaacctcaatcaagtgataaaaaccagcaaacgcagtgccaagtacagctgctcaagtaccggctgcggtcagtactgaaccatctggaaagccaagtaatgcagataaccccacagaggacgggtggagcttcttattaacaattcttagaagaggctttagtagacaacctcaagaggaagaatatattgcatacaaggatattgaccgagctaaattttcaggaatgagtattctaacaaatttaggtaatggtttaggtaaagatataacggttcgtcgttggcattgggatgctactcaagggaaatgggttgaagaccgaagtcagcgtaagggaaaaactgggtggtcacttttctggggtagcttaggatttttagatgttgatagttataatcttgtctataagcccttaatcggacagaaacaggatgtcccagtcggcacatactactaacaattcagtttctcagatggattgctgaattataagacgttttattctcgattggctaaagttgttgtgacaccagaaccaattccggccaccgccattaacgcggatactgataacgcggatggcacaccaaaagtaatttattcagacgttgattatggtgccagtgccatagtcacgccgactaattctactgatgatattagttggcaggcaagcagtaccaaggatttactaaaattcacacctgatgctggacgtaaaacatctgttaaggcgggaaatggtgatgtggagggtgaaaagtataagccagattcgtattatactggaaaattgaataaagatccgaatacaccagggattccagctaaatataaaattgctgcaaagaatgtctctaaagagaaaacggtttatgttggtgggttagcagcctacaagaaagcggcggatctcggtgggacttggtcagttgatggtttgtcagacctagctaaggcatctggtgcaacgagtaattggcattatgaatggcaatttacagatggtgaggataagacaataacccccgctactaatagtggtgtttctaatcttaagggtgacattacaaatttagcgaacttaaatacggaacaaccactaacctttagtaaagatagtactttcatgaaagatgctgcagctgcaactacggctggaaagagttatcgagcacagctaacattaacgactaacgtaacggaagaatcaagtggaagttcaaaaaaagttacgattgtttctaacgaagctgaattacaagcgcaaccagcagttggtaagttgtcattggatcaagtgcctagctttagatctgggaacgtcttatcaaaagatatttatgttggtacaactgctcaggacaagcaatatcaggtcagtgatgggttgaaaatcacggataccagagcaacgccaggttggaaattgacagcgaagatgagtaaaatggcatcaaccacaggcaaacaattaagcagcacagccattaatatgactggcttgccaacgaacgtaggattatctgataatggtactgaaacaccgattatgacggataagatgtcgaaaacatggcaagttgctgggaaattagcattaagtgccaatccaagtattcaacttgcggctggtgatacattctcgagcaacattacgtggactttaaatagcgcacaacccgcagcaccagcggcttaagttgttgattagaattaataagtaaattaaaaaagatgaatgatttcctgaatatcagggaaccgttcatctttttttgttagtcgatatatttaacagccgtgccataagcggcaactgattgcatatctgttccgattgaaccggaatcaaagcgcatcatgacaaccgcatctgcgcccatttcaagtgcattttggcgaagccggtcgatggctacatcgcgtgattcagtcatcatttcagtataggctttgatttcgccaccgacgacatttttcaatgaagcgccgatgtttttgaagacgttcttggattgagtggttaaaccgaaaacttcaccgagcacttcatattttttaccaggaatagtttcggtggtggtgatgagaattggatttgtcatgattaaagcccttttttagaagaataagattaacaataatgtgattaaagcgggtaagccttgtaagaagaaaattttcttggtggcggtaaatgtcccgtaaagggcaacgatgaagatgtagagcattaatagggcgaggacaatcttgagcgtttggccggctaataacaggttgaccatgataattacggcgcccaacattccgttataaatgccttggttggccagtgccacgcgggcatttggtagtttgacaaagtccagcggcatgtcaaaagctttcgcctttgtttcagcactggcaaacatttccagccccatgataccgatgtgttcaacggcgattagataagttaaaacaagaatcaatacttgcataagttagtgcctcctcaatggtggtttcattataacaaaaacaatgacgcatgtccaaattaggccataaaaaaacacgccagagaatttctggcgtgttccttcatcattaaccgcagtctgtataaccgttgtagttaagcatagatgttataataggcacatgtggtttaaaaagtaattctaatggatgggtggatgatggatgaaagatattgaatggtttataaagatgcttgaagaaaaaatagaagaaaagaatttagagtataatcgattcatggttttgttatggaataataataccgagattaaaaacctttttgaagaaatagattcttctatacttaatatcaatgtaatcatatcagagcgattattagatataccttctaaattacaagctataaaaacacagcaaattatcactgaagttattagaaataatcctcaaaaggttattgttattgataattttgagatattatttagtccaatattaaaagttaaaccaatagaattatttagagaactgagtcgttataaaacaattattgttatttggcgttactcttatgaaaacaatagattaatttatgctgttccagaacatgctgaatatcaggaaacacagataaataaaaatgaaatgattatcaattaggagaatgaagaatgaaatatagagatttagttaattttgaaccaatagattcagtcatccaactaacagatgcaaacaataaagaaagagctcttcacttattagatacctttgttatatccgacagaatggctgatacaattaataatactattattaatcagttgcaattttacaaaccagcagataataaaggattgatgattgtaggtaattacgggagtggtaaatctcatttaatgagtgttatctctacaattgctgagtatagtgattcaagtcagcaccttcaaaatgaagctgttgctgaaaaagcacaggaaattgaagggaaatttaaagttattcgatttgaaataggcagtacagaaatgtcattacgtgaaataataacacagcagttagaacttggtttattggagctaggaattactttcgaatttcctaatgccgatcagattgttagtaataaaaattctttactagagatgatgtcaatttttaatgaaaaataccctgataaaggattactgctagtagttgatgagttattagattatttaagaggaagaaaagagcaagagttaactttagatttaggatttttacgagaagttggagaaattgcatataatacgagatttcgatttattgcgggtattcaagaaatgctttttgataacccaagatttagttttgtagcagattctttgagacgtgtaaaagaacgctttgaacaagtaagaattgtaaaagaagatatttcatatgtcatatctgaaagacttctaaagaaagatgagaagcaaaaagctcttgttagggagcatctaaccagtttcactaaattatatagtagactagctgaagacatggataagtttgtggatctttatccaattcatccaagttatttaactgcttttgagaaagttcacaatattgaaaaacgagtagcattaaaaactattactatggaaattcagaaaattattgatcacgatgtaccagtggatagtacaggagtaattgcatatgataattattggtcttttattgaagaagatccatctaataaaaccataccatctgttcgagaagttttagaaaaaacagctattttaaaagataaagtcaattcatcatttcctagtgatcgtaaagggcagatgtataaagatgtttcacttcaagtcattaatgggttggcgttgaatagactaacagtggatgatatatacagtcctgtgggattaacagcatcaactttgaaagatgatctatttcttgtaattccaggacaattagattttttattggaagacgatgatccatcagcatttttagaaacgagtgtctctgttgcaataaaaatgatcatggaaactgtaagctatcagtatatttcagtaaaccaagagaatggacaatattatcttgatttaaagaaagatattgatatagaaagtttaattagtgaacgaacagagatcatagaaaacgctactttagatagttactattataaaattttacaaaatgctgttgcactggatgataacacttacgtttcaggctatcgtatttggcaacatgagttaccttgggaacaaagaagggtaatgagaagaggataccttttctttggatcacctaatgaaagatctacagctcaaccagaacgtgatttttatgtctatatgctgagaccgtttgaaaaagttcaatataaagatgaattgaaatcagatgaggtattctttgaacttagtttagaagataaaaattttaaaatgaatttattgaattatgctgcagctaacgagttatataatgaaactacttcagctcaaaaaaggttatataagaacaaaatagatagttattttaaaaaactaaataaatggttaacagaacactttatggatgcatttaaaataacttataaagggaaaacaggatacttaaatgattttggaatgttcttacctcaagaggataacgtaaagtctttagtcaatttttctgcacaggaatttcttgcagaacatttttctgagaagtatccagaatacccaagttttagaaattataaaccaggatttatttctagtaataatattaaagttgttgcttctgacgcattacaaagaataaatggtagaaacagtattcaaggtgagtcagttttagaaggcttagttcttctaagtaatcaaaaaacaattactagtgaatctgttacaaattcagcttatgcacgttggatagttgaaacattagaaataaaaggaaatggtaaagtattaaacaatgatgaattgtttaatattaacgctgttcgtggcgttgaagatcgtcgattatcaaaatcctttgatttggagcctgaattagttgttgttttactaggagctttgttaagtacagggaaaattgaagtcaatatagatggaacaacatatacagcaatggatttttcagaatttgcagtattatctatggagaagttaactaaattctcatatattaaaaagccatcaggattgcctttaatagaaatcaatgaaattttaaatttatttggtgaatcagctctaaataataatgaagaaatattagaaggatcaatccgccgaatgaattctaagttgaatatttttattgaagaagtactaaaagtgaaacgccaactatcaataggatatcttgttggggctttagatgttttagataataatacaagaagtgaatatgcagatcagttagagtcgtttaaattattctgtgaacaactactacgctacaatagtattcctaaaatgaaaaatttgaatgtgtctatttctgagattgaaaaacaaaaacaaaacaaagagcttattgaagcattaactacattgaaaaaaagcgtagatgaagtgagccgattggtaaattatcttgatcaagcaaaatatagttatggacaaaattcagattggtctaaaactattgatgatactgtatctaaattacgttcaaatatttctgatggacaatcatatatgtctaatctttctgaattacgtcaattaaaggaagagtatattacgcaatactatacaattcatgaacaatcaagactaacagcgactgaagataataaaaaacaagaaatattacgctccccacagttaaatatgcttcgacgcctacaatcaagtatatctttactaccaggagagcagttaaatacttggcaagaaaatctagaaaaaacaaaaacgtgttatcaattaaagaaaacagatttagaaacgactccgacttgcccacattgtaattttttattaagtacagatagacgtgattcaagaaatatcgttgagaatgcaatggatgagttaactgatatttatgataactggctaaatattttagtagacaatttaaaacaggattctatccaagaaggattatctcttttaaccaatgatgagcaaaaatccgttgaattgttaatatctaacaaagaacttccattaccactggatcagaaatttatagatatgataaagaacctttttgatgggtttgaaaaagtagagatatctaaagaagatattataaaaatacttgggaacggtagtcctatgagtgtcgatgaagtagaaggtagaattcgtgaattaatagagacagctattgatggtaaagataaagataaagtaagaataatgtataaaggatgatgattttatggatcaaggttcattgtttgaagaagaaaataaacctgttgaatgtttagggatgacatttgagagtgataatgagagaagagagtattttagaaatgagttgcgtaaaaaattacctgacttaaaagatattgaaggatttcctattggtgaggatgaagatattattgagttatctgatccaccgtattatacagcttgcccaaatccatggactataataaaaaaaagtagcttacctagagattataaaagacatccatatgtttcagatgtaagcattggaaaaaatgatccgatttatactgcacattcttatcatactaaagtaccatataaagcaataatgaaatatattttacattacacagatccaggtgatattgttcttgatgctttttcaggtacgggcatgacaggagtagcatcctctatgtgtggaaataaagagttagtggaagaattaggaatcgaaagaggagaggttgggattagaaattctattttaagtgatttatcaccagtagctagttttataagttactgctacaattctcctgttaatgtaaataaattgaaattttatatggaaaaaataataaatgaatctagagaaaaatatgattggttatatcaaacgggagagaaaataaaatatgaaataaattatgttatatggagtgatgtatttttatgcccagaatgtaatgctgaattaatattttatgagtccgcggtaaaaggtaaaaaagtagagcaaaattttatttgccatagatgtaacgcaaatttgacaaagcaaaagatgaatagagcatatgaaagctcattagatatggtaacaggagaaaaagtacgtctagctaaacaggtacctgtagcaataaactatattgatggaaaccagaaaattttaaaagatatagaagataatgatattagacttattcagaggatagaagaaatccccttcgaatcatggatacctatagaaaaaatacctgaaggtgtaaatacgaaacaaccattttcaagccatggtttttcttatgtccaccagttttatactaagcgaaatttattgattttatctgatttgtctgagcgaatcaataatttggatgaagatataaaaaaacatgcttatttatgtttacaatctattatttactcattaacttctaaattagtaagatataacttgggtaatagagggaatggtattttaaatggaaccatgtatgttccttctttggttgcagaaactaatgtatacaaagtactttcaggaaaggtgaaagatataattaaagcattaatggtttctgataggaatacaatggttgggatttcttctgcaacttatagtaatttagaagaaaattcaatagattatatttttacagatcctccttttggggcaaatattaactattcagaattgaactttatttgggaagcctggttaggtataaaaacaaacaataaggatgaagccattgtcaatactattcagaataaagaattattagattataaatggttaatggaagaaagctttaaaaattattataaaatattgaaacaaaatcattggataactgttgaatttagtaattctaaggcgagtatatggaatgcgattcaggatgcgatgcaaaaagcagggtttataattgctaatgtgtcagctttagataaacaacaagggagttttaaagctgttacaaccacgactgctgttaaacaagatcttgttatttcagcatacaaaccattagaaacgactgtcttaaaaatgaaacaagctaatggcgatgaaatttcagcgtggttatttttagatcaacatctattaaaattacctggatttgatggtaatcatggagaagcaaatataatttcagaaagaactcctagaattttatttgatagaatggttgcctatcacgttcagtcaggaatgcctgtgccaatatcttcagctgaatttcaggaaaaagttgctcaaaaatatgttatgagagatggaatggtctttttagagtctcaagtagctgagtatgataagaagagaatcttagcgaaagaattttcacaacagtcattattcgtttcagatgaaagcagtgcaattgaatggttgcgtcaacagttaatgaagaaaccgcaaagtagacaggatattcatcctcaattcatgaaagaaattcagtatattgcaaaacatgaggaactaccagagttggataaccttttggcagaaaacttcttgttatatgatagtgaagataatgttccagatcaaattgctgcctatttacgaaaaaattatcatgatatgcgtggtttagtaaatcaagatgataagatgaagagtaaggctaaaaatagatggtatgttcctgatccaaataaacaagccgacttagaaaaattaagagaaaagagtttgttaagagaatttaatcattacgtagaagaagttaatggaaccaagaaaaaattaaaactcttccgttctgaagctattcgagcaggatttaaaaaagcttggagcgaaaaagattatcaaaaaattgtagatgtagcagaatatttaccggaaaaaattattcaagaagatgataaattattaatgttccacactcacgcattaatgagattagatatttaggaggttgtatgatggattgggtagagaaaatgaaaaacatgtttcctagaataggagagatatatctcgtgaaagatcctgataatatcttggatgattcgagtgtaatagatatgtttagtcggaacaatattgactatgttgattttcttgatccaattgtttttcgatatgcctatgaaactaaatataagtatgaaagaactaatacgttggttattcgaactgataattattctgaaataccttacgatgtttacgctaaatcttttcaggtacaaattaattcaaatgatttaataacatttttagattactcagcaatgaaagagtatagtatcgggatacctgagttagttcacattgattcatttcaaaataaaattttaaattatgaagaaactaaaattttattatctaaagaacagtcacgtgaggatagtgaagaatatgttttacctgtagctaatgatattacaacttttggattagtagctatgattattggtcagtggagaagtggggataataccttaaatgaaaagcaaatttcaagtattaatgatgttaatttaaaatttcagcattggttaattaaaaattttgatcaaacagtttccctaccgttgtatcctaaaccaaaaatggttcatcaaattcctgattttatgaatcatagtgactataatcagaaaaaggcattaattgtaatggatggaatgagttttactcagtggaatataataaacgactatcttataaataatcaatttaaaacagaagtatctccaactctagcatggattccttcgataacttcagtatcaagacaatctattttttctggaaagccaccgttgaattttagagatactattaatacaacaaattatgaagaaaaacaatggaaggatttttggatagataaagggtttgacaaatctgatattttttatcaaagggctctaggaagtgataattatttggaaatggatttacaacatatactaagaaataaaaaaattattggttgtgtgatagatagtatagatagatttatgcatgctgctcaacaaggtttatggtcggttcattctgaattaaattattggttggataaaggtttcttactatcatttttaaaagatttgattgagaatgattttgaagtatatataacttcagatcatggaaatatcgaatcccaaggtgttggaaggattaaccaaggtgtcttagcaaattcaaaaggagaaagagtcagagtatatgatgataaaagtatacgaaatagaactagagaagattattttggagtaagtgagaattgggatagccagtttttaccgcagaattattatcctttaattgcgaaagaaaattatgcatttatcactaaaaatgataaaattgtcgggcacggtgggacaagcattgaagaagtatgtgtaccatttgttaaagtaacaagataaggaatgaatagaatgaggaaaacagtcggtttatttcgcccattgagatttgatcatttagatttaacagcaaagcttttagttaagtattcgatacctgatacatttgaaatattagatgatgttttagccaaagagtttaaaggtaaggaaggtcgccgaaagataataaataatttaactagagtatggtcaggtggtaaaaaagaaccatctacttttcaaaaagaagtattagccaaatataatgcatcagataaaaatgataagattatctatcaatatttgatgacttctttagcatttccattctttagtgaaacgaccacctttgttgggaagtatttaaaaatgtctgatacttttaaatctagtgttattttatctgagatgagaaattcctatggaagtgcggagtcagtttataagggagtcaatgctgttttaaatggtttgaagagttgggagatactatcggaaggaagtagtaagaagcattatatttttaaggagaacttattagagattagtaatgagtttcaactaaatctcttggtacttgtagctatacaaaattacgttggtgattcattaactattgaacaaatcaacaatcaagcctctatgtttccttttagttatttaatccgaaaagaagatatagtatcttctcaatttgaaattattgaagacagacttgatacttatatttcgatattatcataagagtagtaatttaaagaatgcctagaaaactatagaattaattgatgaattaccagagtttgaaatgatagaatcctaaaaggatgtgtataaatagtggatgggcagaaagaaacttttgagatatctaaaactataaaaaataatatcgaaaattttgaattatttaattcacatgttgataaatacactcaagatattttcgagataagtagtccttacgagtttttactctcacagtacatggaaaaaggaggaaccagagagctaaataatatctttagtttagacggaaatagcctacttaacttagcgggaacttctactaatttaaaagagcttctattcagcagtaaaaatggttttgtttatcaaccagattttgatagtttatcgaatgatacaaaagaaaaaataaagtctggcatttttaaaatcggagaatcaaagaaaattgaaggaaatctgagagcagtaatagttgatagtactaattcaaatcaacgtgtggaagatctaactttgaaaaaagtggttgtagataaaaatattgcacgtactttaacagatttagctgtccaggcacaacttaagcagatatatgaaattgtagtggatatacaggaaacacaagaatatcagcttcactgggatagaaacaatagtattttagcgccattttttactgctcgtacaaagatactagagtttaaaaagagcgatgacttaaatcgaaaaattcaattattagaagctgcttctgatagcatggaacaagcagtaagtgccattaaatcagaccttatctcaaataaggatcacattaaaaaaatactaaaaaaacccatgtacagatacagtacgttcgaaagacatgctaattttatattatctgatattaatcttttgttaaaaatagttggcatgcaaacatatattgatttaactcttgataatgaggaagtcgcaaacggtcggctggaggctgtaaaatatatttttgagctgtattctagtaggaatattggcgaaaccggaaatattatttcgaatacattggagcgtttgccgtttataaataatataatacctgacgttaaaaagatagaacttcccagtctactagaaataattcatgataattatcgatatacttcagaaaataaagattcatggctgaatatcaatgatgaaatgaaagagggaaaacaattcagtttactaagtgagggggagttagattatgaaaaagaataataacaataagaataaggaaaaaaactgtatattttgtaaaaagagaattgattcagcaaaaaagattaatatatgtagtagctgtagaaaacgttcaaaagatagtctctcagccttaggaattgtatcattgagtttagtaggtatttcaaaaaaaatgaagaaatgactagtctattttatggtgttaattggtgttaactttatccaaaccaatggatttttatcatcaaataagtatttttatattttgtaattattgatataaaaggattaataggtattgagtatccttcatttctgagcatagaattctcaaaacgttaatatcaatccgatattattcggttttgcaaaacaccccacaacttatggttgtggggtgttttttttactaactagatagcactagagtagccatgaaataaaatgatgagatgttcaacatgaccaaatcagtcgttaactttttagctgtcattataatcgttcatttaaatcattttatctacaatgtgctattaaaaatagattaacgagcatatggagcactattgaacatctaatatccttcgtccaaaaataggtactgcccaatatccatccaaatgaacaataaataagccaattatagtcaattttcagctgatgcgcacacccaaaagcaagccctgatacaataattttcatcaccgtatcgcattcgtttttttaataaaaaagagattaaagaaaataccagaaataataattcttctagtgttggtgcaaacaaatcattgctgagtgtcgtcaaaatcggaacagccttcattagctcattaatatagacttgattctccggcagcgctaatgggttccaacgtttatcgatccaatcaatcactagcacaataccaaacatcactaaaataagtacaactttctttagcatcggctctctttacacattttgccagtcaggttttggttgtctcatataaattctagtaaacaaaaagactattattagccacaccccaaaattaacagcaatcaatgctggttcatgcgtcgtcatataatttgtactcaacccgaaaagggcttccatatggacgaacatcactaatatcaataaaactataaaaaagctaatccgatggcataacgttccgatcttcaacaatttctttctggatcccctactaaactaataaccatatctaatcatcgataatgccgtcatttcttttaacttagcttgttgactggctgatagatccaaaccttctttttgaatcacattcgcaattgcgatgttcattcggctcaaaattaatggtactgctgtcgtttgtgcttcaatttcagtttgataactatgcaaaactgattgtaatggtgccgtttggtcatcttgtttcaagtcgtttaataatgccttaatcattgtaattgcttgatgcccacgttcctgtccatctgcataccatttcatattcaatcgtcccttactcttaatcaactgttgagacaatcataacgcttatctacatcattgacaaataactaaaaaggaactataactagtgtgaattattgttatttggaggggtttaaatgataagtcaatcaattgcaaaagaaaacatccatacactttacaacagtctaatggcgcatccggataaatcaaatgcattgttagatattaccgatgttttactacaggtctacctcaaaattgatacggttaagaatcccgaggcactcgtcaatcgcctggccaattacatctatagtgttggctttggcaagattcatctcaccaaggatgaagaacacctattgattgatttaggcgcgtttggccaacgtgctggttggaacggcgtttatcgcggtgattatactgccaaagccgattttttcagctatgccgatgaacataaatatgctagaaattaaaagagtgtgacggaagtctgggatttcccgagcacgcttagacgattagatttgaccatcagaaaagggattgagacaaacacaacgtttgtctcaatcccttttttaggcaagaatattgccaatcccatggttaataatcgtaaattcagtcggttgtaaatcagtttgttcagtgacgattggattcaactggtcaatcgtaaacggcgaagtaaacggaaagccgtcaccgtactgattaaaataagtcacagtattccccagcacgcttttcaattgctcagaatcgattgcccgcgtcactgtcaccaaatacgcacgattgttatcgcccgtcaaagtggtgctcgtaaaaaatttaaaatagtctttcgtactcatcactgatccccccaatctttaatcaacgttattataacgctttcaaagaagcaattacagtatctttcgtcaattccattataatccaccatcattgcaattcatcaccgttacgccagttaacttagatccccataccacatcacttggtgattatcatcagctcaatccgaagaattacgtcccagccttacaaactgaatcgggcgagttcatgactgaatgcgccgttattttggaatacatcagtcaacaaagtccgctgccattaatggcggactatgccactgaacagtactggcaacaacgcacttggctgaattacatcgccactgaattgcataaaaacttcatctcaccatttcgtaaaggcaattggctccccaatacacccgaaagccaagatttagtccgttcgcgagttttcccacggcttgcttatgttgaaaaagcgttagcggaccagtccttcttagttgctaatcagttcagtgcaccagatgcctatctatttgtcatgacgaattggtgtcaacgactcgcattttcattggctgacttccctaatctggatcgttttgatcaacacatgcgacaagacccagccgtgcaatccgtcctcaaacaagaaggcaaaccacattcattgaaagcttaatcaccaaaaaaggaatcagcagtcgctgattcctttttgaatgatttacatcacattaatcgtgacatcaatattgccacgagttgcctttgagtatgggcaaatttcgtctgcttttttgagatacttcattgtttcttcttctgataaaccttcgatgtgaccgaaaagatcaacaccaatataataattggcagggccatcactataaagggaaacagtcgccttaatcgtgggttcgcctttaatatgttcttggttaaggacaacatctaaggcactgttaaagcaagaactatagccggctgcaaagagttgctctggatttgtactcttccctgatgggtctgtccctggtgacttgattacatatttctttgcttgatcgggtgaataaacgaagccattgcggcccccttcattaatcatcgttgtttcatattgttttgccatttaaggtccctctttcttttattgaatacccttactttagcacagcaaaattcagaaccataatgatttgtttatacaaaaaaggcgccagccaaaaaatagattttggactggcgcctttcttgttaatcctcaggctataaccggctgatattcacacgctatttaatataagccgtcttgtagctccattgtgcgccagctgtgttatgcacaacgtctttgacctttggattcttcaagtatgccgtatcattttgatagagtggtgtaatcccttggactttattcatgacttgcgcagccgtcacgaggtccgcccaacgtttgtcaggatcgttcgcatcggcattcattgcgcggtcaagggcagctttgtattctggattgtcgaagccgccggtattacttgcagcccctggtaacatgatttctaaaaacgaaattgggtctttgaaatctgccccccaacctgcgagtaataaatcatagtcgccttttttatcacgactcgctgaaacttggcttggcacggtctttaatgtcaacttgaagcctggtaagactttttcaagttgacctttgagatattgaccaacatatgacgcgttggcatcatcggaattaagcgttaaggtgagggcaactttcttttgaccagtcgctttcaatgcttcatgccaatgtttaagcgctaatttttgattgtaatccacggtatctggcacggcttgtgatttagcaaagtccaccttcttaggggagtcggctaagcccactggcacgaaaccagtaatatcgtttttcttcgaaccgaatagccggttattcaacgtcttacgattaatcgctaacgaaatcgccaatctaaagtcttggttattcaaaagtgcttttttctgttcatctgctgatttgaagttatatttaatgtagttcgtcaacgcataaggatatctatggaatgctttatcatcccgataattatcaatttgttgattatccaactgggttaaatccagtttcttttcctgataaagataaagcgcggtgctggtattttctaacacggtatagttgacttggtctaattttacctttttgcgatcccaatattgattgttcttcacaaattgccacttctcactcgtcccattccagttaactaacttaaacggaccagagtacaccatgtatttcgcattcgtcgcatacttcttaccatatttttcaaccactttttgatcctgtggggcaaataatggataagccatcaaggttttcatgtaggccacaggtgtggataatgtgacttccaacgtgtgctcatccactgcccgtatgccgagttggtctggtgccagctcaccttttgcaatcgctggggcattttggatattactgaaaaggtttgtataaggtgatttggtttctggtttcaatgtccgttgccatgaatagacaaaatcttgtgcccgaatcgggtcaccattactgaacttggcatcacgcagtttaaatgtccacgtcttaccatcagctgaaactgaactcgatttcgctaagcctggttcaattttaccgttctcaccaagccggaataaactttcataaatgttccctgtttgaccatatcccgttgaagtcgagatatcaatggtatctagtggtgcttgcgcgccaagctgaagaacctgtttggcttgcacccccgaaacttggcataataagaacaccccgaatataaaaattgcactaacactaagttttaagaactgccgccctctttgcatgacacgcctccttacatttaataagtagagcataccaaatcatcagtcaaaagttaaataataagcctaaaaaaagaggcctttgtaaaattaacttttacaaaggcctacaatattaattagacggaattctcgactgacggcacattctaaacgtgcttttcaaaccatgttcctgcgtttagcctaattagccaaataagcggcttcgccgctttttcgtctaattttgctaatcctcagaacataaacggtttgaacgcactcttattcgaaacgtgctttcaaaagcatactgctgtgcttagctacacaagtcaaatgattgctttcagcaatcattcgtcttgttaggctaatgctcgcagtatacccgcttttgacgcactctttagttcattatttcaaacaattgttttctgaattctggaccatacatgactgctccgactgggatggcgaagtctagtgcttcgttaattttagtcgtccaggttggtccgaagcccccacagagttcaataaattgaatgccttctgccttcaattgcttagcgacttcaataattgaaccatcttctttagcacgtggatcgaacccgacggtaatcatctcgcacgttcccattggattacggttaatcaccgtattttattcaggtgaaaagtctggtgaaaaatagaaaaacgcccatttatgcaaatttgctaatgccattgtttcgtcctccttgtttgctttcatcatagagaacaatcatgatagaggcaattttactgcctcttacagccagccattatgccgtgcaatctgaattgcttcaacgcggttgcttgcatccaatttgcttaaaatcgtagttggtgcgcaatctcaagccctgtcatgcccggcatctcaatatctaacaaaacaacatctggttggagggtttcaatctgatcaagtgcgacttgtccattgacggcggttccggccatcgtcaaatcatcctctaaatccagaatgcccgctaaagcggtattcaatagttgctggtcttctgccaaataaagtttaatcatgcccttccctccatcttaagtggcaccgtcatcgtcaactgtgtgccccggcgaccatcgaccatcaactctccatcaatcgtttctaaccgttcgcgcatgcccacaatcccatgactcttatattgatcttcgcttttcaatccgtgaccattatcttcaatctgcatctgaaaagtcgttgcggttcgattaaaaaccacgtaacactccgttgcctgactgtagcgaattatattggtcacggcttcatgtaaacattgcgcaagcacttgttgattttgttgtggaatcccctcaagttggtcttcatttttagtcagcagtaaaatgcctgcaacgctgagattccgttcttgattgatcaattcctcagcaacggtcacttggcgtaaaccagcgacaatctcacgcaccatttttaaattctgacgggaggcttgttcaatctcgagtagttgttcgggtaccgcgtccggttttttcgccaataatttacgtgcatattccgcttttagcgtaatcattgaaaatgactgacctaaattatcgtgtaaatcccgtgcaattcgttgccgttcgttctgcttaatcatatcggttaatcgctgattggtctgcgttaattggcgatttttccgattgaaacgctgaatcgagctagccgcaaatggtgaaaagatgcagaacaagccgtacaccattaagccaatcagatcatcgcgtcccatatgaccaccataataccaatatagggtgaccgctggtatgattagtgacaacagataagcgtagtaatagcgccagaaacttcggcggcgcatgggaatcgaaccaaacacccaggcagtataaatattcagataaagcgcctggataatgactgctaaaatcgcactggtcaccatttgtaagataatccagaatgcgcgataccgcgatgcgacatacccattgcgataagccaccaagaaaatcagaatcaagcccataatcgcttgctgcttaaccgtttgatacggaaacgcataaccaattggaaagagcaagaaaatcaaccaaacatatggaaataagccatattggggtggcatggcaatgtagcgtttaaaaaaattcatgcatgcatcgctcctcttttatgatggtttaagtatacgacaattgccagtaataacccagcccagagcaacgtgatgccatattcacccaagtgtgcgggttgatgcgcaatcagcgcttggccaatatgattaatcggataaaccggcaaatgcttgccaatcacgcgagctgttttgggcattatttctgttggccaccataatcccccttaaattgctaaggggaaagctaacaaactagacaccagttgaatctgattttcatctgttaaaaatgaaatgctaatcccaattaaacaaaggggaatgctggcaaaccacaaccagcccgccgttaataaccaactggaccacactaaatgaatttgattactaatcccagcaactatgaaaatgacgccgatcgttaaagcattgattaagcctaagttcaacaacttagccccataataagtccgatgactggttggtgataaatcgattaaggaaaccaagccatcccgtgcgtcattataaagtaatgtcgataaagtaaacgtgttgctgagaactaaactataggtcgccatactgaccatgtattgtcgattgaatgctgcattcatcacaccctgtttcattactttcgtaaacaagagataaaacgcaatcggcattaagagtgaaaaaataacaaagcgtggattacgccaatatgcgcgtttaaagtctatttttgtttgtaccatcattgtttgtattttttagtcctccatcatttcgctataaatttcatttaatgagcttgcttgaacctgcacatcatgaacctggatccccatcattggtgctaattgacttaagatcggatcgctcttggtaacttgcaacagcaccttggccccagtcttcgtcacgcggatcacgcctggccattttgcaaaagtagctgctggtaaatcagtcgtaaagcgaatctgcgttcctttaaattgttgttgtaatgttgccaagtcaccatcgaattggaactggccatctttcaataataaaatccgggttgcaatgtgttcaatttcctctaaataatgcgacgtgacaataatcgtcttgccggcttcttttaactgttcaatttgctgccagaatttttgtcggctgccaacatccattccaacggtcggttcatccaagaatagcaaatccggattgcctgccatggctaaagcaaaggagaggcggcgtaattgaccacctgaaagttgggacaccatcttatgagcctgtgccttcaaatcagctagcgttaataattcagtgactgaccgtggctgttgataataactgcaaaccaattctaattcttcgatgacactgacccgagccaatcggacatttccttgcatcatcgcacccaataagttgaaatgttctttctccgttggcttctgacctaaaatccgaatctcgccagccgttggttggagtcggcctaaaattaaattaatcaatgttgacttgccggcgccgtttgcacccactaagccaacaatctcaccaggttgaacacttaagtctacctgatttaaaacaacttgttgttcgaattgcattgtcacttgtttaatttcaatcattgtcatcacctcatttaataaccctagtatagaagtgattccgttttgtcgttagacgattttgtcatgacttacagatgacaaatgtcatgtctttggtgttaaaataaagctgattcgttttaactcggaggttttaattatgacaccaagccaaccagcagcaccatcattttttacgaaccggtctacccaagccatcgcgcaagatttattaggaactcacttgctttataccagccaccaaggcacacttggcggcctcattgtggaagcagaagcctatgtcggcaccgatgacactgccgcgcatgcttacaatgggcgccgcacatcctttagcgagccgctctatcatgagcctggtacaatttatatctatcaattacgcggtttctttctatttgatatcgtgacccaagcagtggatcaaccacaaggcgtcttgattcgcgccatcgaaccgacccacggcattgaacaaatgcgcctcaatcgcccgaaacctggcgtcgaactgactaacggccccggtaaattaatgggcgccctcggcattcacgataaacaactgacttttcaaaatgtggcggacgcccctttaatgattgatttatcgcatcgtcgccaccccaaatcaattgtcaccgcgccacgaatcggggtcaattataaagcagcgagtggtcaacttccttatcgctattatgtcgctggtaacccgtatgtgagtggtctgcctaagcgccagtgggacttagaacaacatggttggcaattttagcgccaatgtcaatttttaattgaaagcgatttcaacaatgctataataatcttgtgaattggtagattgcaaatttaatccgaatttttggacaaatttgtcagcataacctgatatccataataaaaagctcctttatgatgtattatatcgaacagtttgtccgtaattccatcataggagccatctgattgttccatgtttaggtaaactagtcccttttttagtctgtgttttggatggtgtatgtgtttcaatggaacgattgcaaccagtcataaaaaacattgtgatagatagtaataaaatgaagactggcattatttttttcatagtgattgttttctccctgatcattgaatttgataaattggatagcgattgtagagcgggtcgtttagattggctgtggcaacaatggcttgtagtgtgaagtcgcgtggaatgcccactgtgaccatcccatagccaaagtcttggtgtggtttaaactgattatcggcaataaaaatgaagccgtcttcgtccagtttttgataggaatcgtgcgctagtgtttgcgtagttgtttgactcaaaaacgttttgagcttatttttcgtattcagttgttcgttcggttgatgcgcaatgacgaaaaaggttttatgccggtaagacagccaataggcttggacatcttttttgtcgtaagtctgttggttttgtggacgcaccgtttttttctgcgaactatgctgaggcgtcgttgtttttgcaggatggttctgacaggctgttagtcccaataatgcaacggtcagcgtcaatgttagccagagatgcctgattttcataagatcagtccttcacagtttagtttaccccctataattataacagttacgcctactttgactagtcttaaatattaagttttatcgaaaaacgataaaaattaattgtttttcaataaaaaacgattataataaaactattcttaaaaacgaggtatcagatgaatgttaaaaaaatggctacttagaatggcattactcggaattgcggcggtatttggtctgttaagtttgttagtgacgatccaaattgtgaccacgaaacacttagaatacccagcgacaatctggatgttggcgattgctgcgtatggtgtgacggctagtatttggtttgcattaatcaagttggcgcagattctccgcttaattgagcaccatcaagtttttctccctcagacgctacgatatgtatcagcaattagaaaagcgattttggttgcgagtttgacggccctttttgccctaccctttttctaccggattacgcaactcgaagatgcaccaggcttgatgttgctggggttaggcctggtcttcattccgtttgcaatcctcattttgatgcagattgttgaagatctttttaaaagcgcaatcgcctttcaatctgaagtcgatttaacggtctaaggaggaattcaatggccattcgtgtgaatttagacgtaattctcgctcaacggaaaatgagtgtcacggcgcttgctgaacaggtcgatattacgattgcgaacctttcgaatttaaaaaccggtaaagccaaagcaattcgcttttcgacgctcgagaagttatgtcgcgtattagactgccaacctggtgatattttagaatatagcgatgattaatcctgcggcccccttttatcggggaccgcttttttaatgcttcagtacactggttgatgcgatatgtagtataataaatccgtagtgattatgaaaggggttttatgctgatgtattacgttgtgatgaagtcaaatgatattcgccgaaacttggcaaccgaacaatatttaatgaatcaaaaaaatttcgatgaaccactcttactattctacattgagaaaccatgcattatcgtgggccgcaaccaaaatacgtatgaagaaatcaatcaaaaatacgtggaagaccatgatattacggtcacacgccggttgtctggtggcggtgggatttatcaagatctcggtaacctttgtttcagtttcgtggtgaacgcagattctgaacaattcggtgatttcaaatccttcacgcaaccaatcgtcgatgcactccatcaaatgggcgccacaacggctgaagtttctggtcgcaatgatatgttagtggacggtaaaaaattctcagggaacgcgatgtacaccaagaatggtaaaaccttctcccacggtaccctttcatgggatgttgatttagatgttttgacccaagccttgaatgtccctgcagataagattgcgtcaaaaggcattaaatcgattcgacaacgcgtcacaaacctaaaagggcacgttgatcctgaataccaaaacatgtcgacagaagagttcagagacgtcttattactgaacttgatgcacgccgatcaactagctgatattgccgaccgcgaatatcaattaacggccgcagacgaacaagccatcgataagatttttaacgatctctatagcaattgggactgggtctatggcaagtcacctaaatcaacgattcaaaaacgcaaacacttcgatttcgggacgattgatgcgcgcttgttaatcgaaaatgggaagattgccaacgtcaagttctacggcgacttcttcggttccggcgatgccaacgaattggctaaaaagttagtcggcacggtttatgaccgtgaacatttagcaagcactctcgaaccaatcgacaccacgtcctacttcacagggattccaaaaacagaattagttgaattattagcacaatagtaactagctaaaaagagctactaccaaaataatcttggtagtagctcttttaggttaacgtgcaaatcgtttaaaacgaatcgtcatgcgtctggtttgcatgaagtgttgacaaataccagcaataactaatgggatgaggatgcctattaccccactaatccagaaaatcggttggtggaatagatttgcgagttggttcattggttgatcaccaggaatgttcaggacaaaagtatccacccagcttggtaacatgcgttcaatcgctggttcaatgtagtgttgatagagtgtcgacagaattagccatgcagcaaataagaaaagccaagctttacgttcaaataacgtaatgaaactgctaatggcaatcccttctgccatgatggtccagatgagtacaatggccagcaggacgaaacggctatcaagaaagaagcgattaatcccactttggtgggcagcaatgaagtatgtgccgccgtagagtgttaggaaactaatcaattgactgctgaagaggctaatcacttgggtggtataactaatactgcgcggaatgccatttagaatcccaaaattaaacggcttgcgggttgtcgcaaacgaaaggaaaatcagaacgagttggctgacgactaaggaaccgctcaagagcgtgaaccaaaaggccttccaggtcatttgattggagaagattaaaatggaaccgcctgtgatgatgacgaagacggcaattgccattaataagccgcgccaaatcgctgctaggcggtaccgcatcattgcattaaacatgtgcttcacttcctttgttcgttaatttaatgaaagtttcttgtagatcgatatggtcaatcgttagacgatctggaataacccgttcttctggtaagacgtcataaagataaaccgtgtataaggtccccatttgctgggaatctaagacgtttaagtcggtacagtactcgcgaacaagttcttccgggccactgacacggtaactcttggcgaggacggtttccaaatcatcatcgacaattaattgagcgtcgttcaagaccaagacgtgttcgactaaggtcgcgatttcttcgatgatatgggtcgcaacgacaaatgtccgtggccgactttcataggcctgtaaaatgtagcggtataagaggctgcggtagttagcatctaagcctaagactggttcatcgaggaaaacatattccgccggcacacaaagcgcaacaattgttttaaaaatcgtgcggtacccagttgaaagctgattgagtttcttttttggattcaaatcaaatgcagtcagcatttctttggcgagtgcatgatcaaatgaaccttgcagtaaggcggtatttttaataatggtccgcaatttgtcatctttattaaagagattgatttccgacatcaagtaaatcgtttgtaacggatgatcgcgaccggttaagaccgtatcgccccatttaatctcacctagggatgcagtttgatgattggctagaatacttaataaggtactcttacccaccccattgcggccgagtaagccgtaaattgtattgggtttaagtgttaagttgatgtcgtcgaggacgacctgtttcccaaattgtttaatcagttgtgtggtttgtaaattaggcatggtcataacccctttcaatcagtgcaattaggtcgtctttggttagatttaattgttgtgcttcagtgataaattgggcaacatagtgttcaaaaaattcagattgccgtttttcagtgatctgtgcgggtgcgcttgatgtgacgaacatgccgagtccccttttcttttcgattaagccgctggtaacgagttgattcatccctttgagtacagtggctggattgatattgaattgtctggaaatttcagttgtcgatgggacttgactaccaggtggaaagaccccagtaaaaataccctcttcaatttgttcggcaatctgccggtagagtggtgtatcattattaaattcaaaaagcatccggaacacctccgtttcgttaattggttagttacttatgtagttaactataatgcgtaggctgcgaaatgtaaaccgctcctcaaaaacatttgattattcgttcatattcacctattatgtacttataatcaaatgttttcagagaggatgagaacgatgcagacagcctattgtttcattgatttagcggatagccgcacccgttttacggaacaagcacagacactccagttattgcaacacttcgccgacacgttgaatcaccattttccagcgttattaacaccatttgcaattaaggatggtgatggtctattgggcggtttttcagcggatgaccaggcacagattgttgatgtctatcccttttgtaatgcctatttaaagagtgacgcttttcaaactttctggcagacacattttgcggggctggcggagcccactttttattttggggttggcttaggaacgatgactacgccgagtccaagtgactatcaggatatcaatcgggtcaacgggacagcaattgtgaacgccctcgccgcagcagatcaagccaaactgttgcgtcaaggtgctgaattagcacaaggttatccctttatgacgacggcctttcaatttcaattagtggcagatcaaccagccgcaaatgggattaatgccctcttttatttaatttatgagcaactcttgaatacgcagttgcgcaaggacgcttttgctgaaatcgtgcttcaaccaacattgaaacgctatgaattagcggaattgttgtggaccaaatacggcgttgcttcctatgaactagactacagtgatcaaaaagggcgtgcattagcctctagtaaagtcagtcgcttactgaatcagattcagtatcccttgattgaacagaccctggcaacgttgcgcgcgcaactgatgacctttaaggaggcagtcgaatgaacctctttgcgcttttcttgcttagtcatattggctgcgactttgtctttcaatctgatcagatggctcaatgcaaacgatcaacgaaactcggtgtgaaatggtggccattatgcaagcacgcactgacacaagtcccgttagtgcttattttatggggtggcggttggttaatggcaccacctacttggccacattggcaaccgttactaatcggcttagtcatcattgtgatgagtcattggctcattgatctatttaaacaaaatagccagccacttttaaaagcacagctacatttaaccagcaatcgcgtaccagtgatgagttataccatcgatcaagcactccatttaatagtgatcggtcttgtgagcatgttcctcggccagcaatgggcgtttaaccatgtgaaccgattgttattggctgccagtattgttttgagcacgttattatttgccgattatttcattagcttctatttaaaaggactggatttaaacatggatcgcctgccagatggtgcaaaactgggtcggcatattggtcatttagaacggtttgccatcttaatcttgttttacacgcacaatgttgcgagtattgctgtgattgtggcgattaaggcgctgacccgctttaaagccattgaatccaacgaacaccacttcgccgaatattacctcattgggagtttgctcagtctgatcttcggctgtcttggcggttatctattaagtcttattgcgcattaaaaaagtgccacagaatcaggatttttcctgttctgcggcactttttatattattcagcgatgattaataatgatttaatcgctttgcgttgatccattgcttcataagcggcttgaatatcatctaaggtaaagcgttgtgtaaagactttaccaggattaatggcaccctttaaaacagcatccaataaacgagcgcgatcatgagtcgttacggcagcaattcccccacgcaaaccgatgttcttccggaataaggcattggtgttcatctctgctttttggggaatgccgacacgaccaatgacagcccctgcgccagcaacggcgacggcagtggcgacggattgttcggtcccgacacattctaagacggcgttggccccagcgttgtcggttaacgccatcacttttgcgaccccttcgtcaccgcgttcagcaacaatgtctgttgcgccgaattcaagggctaatttttgccggtccgcatgacgactcatcgcgataatccgtttcgcaccgagtaatttggcgccaatcacaccacataaaccaacggcgccatcacccatgacaacgactgtgtcaccgggtttcacttcagcggacacggcagcgtgatagccggttgccatgacgtctgaaagcgtcaatagattattcagcatttcatcagagtaatcgcttggttggccaggaactttaacgaggccccagtttgcattgtgataacggagatattcggcttggtagccaccaggattattctcgcggttggtacaatcgccatcaaaaccgtttaaacaagcggcacagtggccacaaccatgggtaaatggcacgatcacaaaatcaccgacactaacattttgtacgtcagtcccaacagcatcaacgatgccaattgcttcgtgaccggtgaaaccgcctacttctcgttttgaaatcccacgataccaccataaatcagaaccacagacgcacgcgcggataatgcgcacgaccgcatcggttggtttttcaatcgttggttttggtgcttcggtaatggtcatttgaccaggacccataaaagtagctgttttcataactataatctcctatctcttcctattatattgtctttactatacaccttagacctcactttaatgcaagctttttttaaagtccaatcgccagttgttgtttcttgcttaacacttcgtcttgggtaatcccaatataatggagcgtcgtttcttgcgttgaatgaccaaaatcaatcatcaatgaccgcacgtccccgaattgtttgtagaaccagtagccgtaagttttgcgcatcgtatgggtgccaatatcattacgcccaagtttcttacctgcttcagtcaacatgcggtaaacaccgttgacggtgatgtggttatcgccgacgcggctaggaaacaaccaatcattgcctagcaattcattattttgaatatagggactgatgtatgggcgtaaactcgccaaactaatttggcgccacttacccgttttttgttcaacaatcacgggattgtcttcgatcacatctttgacttttaactgcacaatatcagaacagcgtaagccagtattaatgccgagtaaaaataataaataattgcgactacccatttgtgaatggcgcaagatgactttcatgtcttcaatctcatcttttgtccgtaaaggttgaacatttaattttttgccatttttagtgcgcgatttccgcatgttttttccgcctttttgaccgcattctttttctctatatcattataaaccatgcggtggtattttgcacctttgattatcgttgatttaaagggattccgagcgcattctttctaccaaaagaatgcgctcaaacacattaaaggctattgatggctaaatcacggtctaatcacgtttataaacgatcaatcaccagaggcgcattttaaggacgtttcagattagtgagtggacaagtggtcgcgaaacttgcttaaaatgcgaattcaaaaaggccccttaaagtcacaaaaaaaacagcgttaagacaaaaagtcctaatgaagtgaacccccgatattggaccaaaatccaatatcgggggtttttatattgacctcatacgtatttttggccatcgcgcattttagaatcaagttagccactgtctcaaaattttttggacaataaaaaacatcaagaacagatatcctgtatcattgaagttcctacacaaacaatggaagaggatattgtcttgatgcagaaacaggataccacacaccgccaaaaaggtcagcacttaacatcactcgagcgcggaaaagtggccggattccgccaagctgggaagtccaatcgttggattgctgctgaaattggcgtctgcccgcagaccattaataatgaaatcaagcgaggtacagtagatcaggtcaagaagagtaatggcaagcgcgtctaccatcgacaatacctgccagaggctgctcaggcacgttacgagactgcacgcttgagctgccatcgtcctgacaagttcgccagcgtacaggtcttcttagcctggtacgtacagcgagctaagcaggacaaatggtcgccggatgcttcaatcggctatgccaagcgacacaagctgtttactcctgaagagcttgtttgtgcctcgactttgtaccagtacattgacgaccaacgcctagagattcgaaatatcgacctgttggagaagactaagcggaagacctctcaccagcaccacaccaaggctaagcgcctggctggccgcagtatcgaggaacggcctaaggtcgttgaacgacgcaggcagttcggtcactgggagatggataccattgtcggtaaacgcaatggcaaggagagcgtcatcttgactctgattgagcgcaagacccgttgccaacttctccgcttgatcgaaggacgagatgcagactctgtgagctatgcattgcgtggaatcaagcgcgaatggggagcttgcatcaagaccatcacagccgacaacggacccgagttcaccgccttaaatactgcttttgctgggacggaaactgagatcttctacgcccatccttacacgtcctgcgaccgtggcaccaacgaggcacataaccggatgatccgccaggacttccctaagggcatgtccctagatgacattagccctagtcaagtgcaggccacgcaagaccgcttgaatcagttgcctcgcaaacaacagggctactgcacactccagcaaaactttgaggccgaagctcggcgcgttcgccgcatggcccagtagtctctctagcgccacaacttctatttgataacggcctgttctgggattgtcctcaacgactggctaacttgttcttgcaagttacggtttaaaaaactataattaattttaaagtaagcggttgcttaatactatttagatatatttgtatattagactttggctgttatcatttgaaataaaagaattattggagggaggatgatgttgagaaaaaaattttttttactaattgcatttgtcattttcttattttctttaggagatttaactgcattttcaaaaacagttagagctgataatgttcacaatattgatccaacgagcattgcaagtaaaagtgaactttcaatcaaaaatattgttggtgagactgcaaaagtaacagaacattcaagcaatatttcagatagtaatattacttcaacaagtgatatttatacgtcttttccaagtggaagtagcgaaattagtataaatatacctggtaattcaaatttttattctgatacaggattagatggtactacttcaattacggttacttatggcaaagatagtcatggtggtgttggtacctatcaaggtaagcaaatttatgctgttataaaatatgacaattttaaatataatgatagttggaagaacaagaactcatcagctaaaattgaattttgtcaggatttatacggtggggtcaactttaagatgccgcttcaaagtatggaagtaaaagttaaattcttttataaatctgacgattcagctgttaatttaggtacagatagctatttaacaatcggttctttgaattatcatgatgcaactcgttatagtgctgactttcaagccgctgaatttgtaacaatgaagggtggacagtattcagatgcttatttaacctcagcaggtcagacttctgttaaggcttatgatccaaactacactattaatgatcatcaaattaatggttatgcaggtacaaagtcagattcaacatataatggttcaatttttgccggtgtaaattctgggacctgggctacttataaatatgattatcttggctcatcacattttgctgatggtggtgtcacttataaattgaataaccaaactgaaatcgatatgcgaattgggatgctggattattatcagtatacatctaatatgtggttttctttatcttctgaatccttatggaatgctccaccggaaacgccgactaaagcagttgatgatacttcgggtaacaacgttgattataacgatacttccaaggaactttttgctggaacagatatcgtctataaaattgcacaacaagttggtgatttaggtgtagatatgatgacaccgtatacatcatttacttatcgtgatgaattacctgataatgtaacatttctaggaacgggtaagatagttgctgaatcaagtaatggtaccaaaatcaaatcatgggatttttcaacaaatagcacagataattcgagtgttggaaccttatcttctacgacaactgatagaaagacaactgttaattttgcgtttactgctgattttctatccaatccatctgattttgatagttcgacgaattcgcatatggtttatgatcagcgaaagtatattcttgagttggattgtcaaataaatgccaatgccccaactgagacagatatcgacaataccgctacagttggaattgataaatatagcaatggtacgaataaagtaacagttcgtgtaatcaagtatatcccacaaactggtagtcaacggttgctggcaatcgtcattttgattattgttttgggaattgccatcgtagtaatttctaagcaccggcgagccaaagaataggataattttatgaaacaagaaaagcatatcaaacaactagtctactcggttggaattttgttttgtattatgatgttaacctatctaggttggcgtggttatcgctattatttatattaccaattgcgccaggctcctcaagtagagctgaacagccgatttttaggtaatgggcgcatcaattcacaaactatttcaagcttgaatcgcaatcgaagaaaagctcaggacaaagggtataatcgctatgcaagcggtatcctaaaaattccgagtattaaagttgatttaccgattttttcagggatcaatcgttatacattgtccttgggagttgctaaagattattactatgactcacaaatgggaaaaggcaattatgtccttgctggtcataatatgcggttgccgggtgtgctattaagtgatttgaaaagcgttaaagtaggtgatcgtgtctatttatataacaaacattatcgtttttcttatcaggtttacagcaatcgagtcgtttcaccgtatgtcaagctagttgatggcattccagccaaaggttcagcttattggctacctacgggaaaacaaacaccaattgtaaccgtttatgattgtgcacaggttggccataaacgacgggtagttcaaggtaaattaattagtaaagggaaaattaaaaaaggagagattaatcaatgaattctagttctttaaaaacaaagaccagcaaactcctggttattggtgttgcggtcttagctttcttgggagctttattaggcttaagtttgcaaaataattcttcaaaagtacatgcagataatactactccatcttcaacggtagacattacagttcataaattgcagtatactggtacagcaccaagcatagacaatgatggtagtgaattgtctttaccaagtactgtctctgcttatgatccatctaaatatggtgatgtaggttttacggtttatgacattaccagcggtgtttcaagtaaatactcaacagatggtctgactaatggtgatatttcggaaattgttgagaatgcttcaacatatgaaactgatgctaataaagtggcaaatcaaaaggatgtaggtactgatggaacggtaacttttagtgacttgccaaattattcatcctcacaaaatcatcatgtttatttaattgctgaaacaaagtccagcaaattgattaaaacaactgcacagccaatggtggttgttacaccaatgactaatagcactggcgatggatatttgagtacagtcaacgtttatcctaaaaatgagattcaaacgttaagctttattttgactaaacaagctgaaaagaatggacaatcggctgcagctttagcaggagctaagttcttgctttataagggtactccaggctcaggcactcaggtaaccaattctgatggtagtgaggttgaactgacaacggatgataatggtaaaatcacagcaactaacttaacggttggttcatactactttgttgaggaagctagtgatgatgtttcaactgatggttcagcaggtgatggctatttgttaggtaaagatgcgttaaatgatgcaaacaataagttaacatttacaattgatagcgatggcaatgtcacaccaactgaccaaacttatatcaactatcaaaaaccagcttcaactaaaacggtcactaatggatcctcaacggataattcatttgatcaaggtgctactgtaaaatatcaagcaacgatcaccgtcccaaataatattagtgattacaccaaatttaactgggtcgatacaccaggaactggtttgaagtattcttcagatactgcttttactttaacttacggtgatagtgttgatggtacacaaacagcattgactaatagcactgattacaatttaacctatgatactgataataagacttataagattgactttttagacagcagcaatcagctgttaaattcttctctggctggcaaagtggttacgattagttatagtatggcacttgatccaacaacagctaaagttgctacagatattgataataattataatttgaactggaataatggaacaggaaaaaatactaataccggtaaagcaaccgtttacacttatggtgctcaatttatcaagaaatcagcaggtattttgggtactggcactgttaattcggctttaagtggtgctgaatttgtcgttaggaatagtaacggtgagtatttgaaccagataagtgatggttgggtaagctcccaagatgatgcaactgtctttacttctggaactgatggcaccttctcagttgaaggtttagcaaagggagcgtattctttgaaagaaattaaagctcccactggttatcagttacgaacaagtgatttatcatttactgttgatgaaagtagtaatagcaagacgatcgaggttgatgataatgccaaaggattgttgtcaaccggtagtcaatggttgatgttaatcattgctttagtcatcgttattggcacgaccttgggagttaaagaatatcgcaaagcaagaaaagttaacgcataattatggctaaaaaaactgacaggaaaaaacgtggacttactggtaatcttttctattgccttttagtagttttattgattggagtagcaacatatccatttatttctgatcaacttttaagtcagcggcagcaagcggcaattgataattatgatcagcaaacagggaaaatgtcagccaaaaaatatttgctacatttgtatcacctgcagaatcatcaaactaagattaccgatgctgatccgtttacgcagcaaaggaaaagtaaatcaacagttaatgttgctttgagtcagctaaatacagttgcagttttagcaattccaaagattaaattacaactcccagtttttgatacagtcagtgaaacggcgttagacaatggtgccggattactgaatggtgccagtgatttggctggtaatggaaaaggtaagaatttagtaattttaggtcacagtggtttgtcaattgctaaattgtttactaatttaccacggctaaaagttggtgataaattttatttgaagattcatggtaaaatcagagcgtaccgagttgataaaatgcgaacggttttaccgagtaaaatgctgccatatttgcaggcgacagcagggaaaaactatgctacattggtaacttgtgtcccactgtttatcaacactcaccgattactggtgcggggtcatcgtatcccatatcatgaagaaaaaattgtccgtaatagtctttcaccttttgcgtgggctttgattatcacggtagctatcttagccttagtattattactgcactggtggagtaaacgaaaaataaagaaaaggcatcagattagaaattagatgaaaggagtgggtcaatgaaagcacgggtaatatggcggcaaatttgtttattgatattcggttttggcttgctgattttaggtacctggagcttggcaactcctgtggtagctgatcctttgacccaattgctagttttgcaccaaaaagatgaactggctgccaagacgacttttaaaatctatgatgccactttatacctgcaaaaaatactggcgcaagattcagctttcaaggatgtctcactttcaagcagtgatcaaagagaatttttagcaacggtcctgttaaagcgggtcgagcggttaaatgctgatcagcttgaacttttcggacaggtcaccagtacaccggcaagtacgactgaacagatcgcaacgattgatttgccggccaatgcaaagttaaaagctttttatgtcgtcgggaaaacggtagctgcttcgacgacccaaccgcagcccttagtcattttagtgccggcaatcgataatcaaggaaatacagtaaaacgcatcgatgcctacctgaagccgctgccatcaactacaccttcacaggaagctacaactggaggcaatgtttcttatcacaaaatgtatcaaactgggtttaaaaatgagaaaaaaccaacgcttgaaaattttttcaaacttgtttggcacaaattgactaaccgattttgacattttgaacgtaagcacctaataaccgaccgtctataaaagagtatatttcagcggtaaaattacctcatcaataaagaatgatgaggtgtttttatgacaaataaacctgatgttgttcagatcaaaatggataaatcctttaatccgcaggctttggctcctactaaagcttttcaagttagggttggtgaaaacaaaacagttattgtctacaaccacatccaatgatttatttgagctgtggaaggtaaacgcggttctgaatgtctcttaaaatctgtctcaaatattgacttcaatccagtttgcaccagatccggtataaggactagcgacttttgatttcctgtacaaaatgctgaaacatagttgattggtcttgatatttaatcttgctagtaaattgttttagttcttgatagcgattttcagcgcttaacagttgttgtaactccttttcggtttgagctgcatcgccgtggtcatcaagcaatttttctaatagggcgcctttttcgatcagccgttgattaaaagcaaaaacaggttgtgggaaatcaggtttactagcaacttgatgaacactttgccgagagttcatctgccaacgaatttttaagtcttcacgcgacaataattgtggtagctgtgttttttcaacttgagcttgttgctgaaacttttgtgtaaattcttgtttagtcttgttttggtgccaatcatcaaacagctcatatttgttggttttaaaatctaaatccataaggacaacctcctaaccaaaatcaatctgatccaacatcgtttcggtactaggctggtctaagcctaaataagctaacgtcatcgcctcactggaatgattgagcagattcatgactaagccaatattatagtttgattgtgtgtagacacgataagccccggttttgcgcattgtatgggtccctagataattaatgcctaacagctcgccaaccttactcataattttgtagaactgtttttccgtgatatggcgttcggggtgttgaatggacggaaagagccattcagaatccagctgatgatcaagcagccattgacggtacaataagagctctggttgaacaggtttaaggtacaaggtattaggtttaccagtttttcggtcatgaataaacgcattttgtttaatagaaccgtccggattaaaaatatcggcctgttttaagcccataacgtcactcactcgcagtagcgtcgctttaccaacttgaaaaactgtatagttacgccggccagctttaaagttgttgagtaaggtatcttgaacctctttgagaacgtttgaatctttgatgggtaagacaacttgttgcatagttttagctcctcagtaattttaatatttcattgagagataatgcgctttctaaatgaatacggtatagttaaggtaatgaaaagtagggggttggggacgtgctgactttatcacatttatccaaaagtttcggaacgatgctagcggtcgacgatgtttcatttacggttaagtcgggcgaaatattaggcttaattggtcaaaatggagctggaaagacaacgacctttcggatgatcttgaatttcatggcaccagatacgggaactattctctggaaaggtcgcgcgtttaccgctgcggattatgaccaacttggctatttgccagaagaacgaggattgtatccaaagatgaccgtggaacaacaaattttgtactttgcacagcttcgtgggcgcagcatcgcagacatcaaaccacagattgatgagtggttggtgcgctttggggtgaaaggtaagcggactgataaaatcaaggatctttcaaagggaaatcaacaaaaagtgcagttgattgcgactttgatccatcaaccggaactcattattcttgatgaaccctttagtggactcgatccagtgaatgcagaacttttagaagaaggtattttatggcttaaagaacaaggttcagcaatcattttttcgagtcatgatatgacgaatgttgcgcggattagtgaccggattgtgatgttgcgcgatgggcaagtggtgctcgccggtacaatcgatgaaattcggaatcagtttggccgaacgcaattattcttagaagcaccgttagcacgcgaaactttagcaaatatcaacggtgtttcacgtgtaacacagcacgggcagcggtttgaattaactttggcagacgaaacggttggtaaaacgattttcgacttagcgacacaaaatggctatatcctagagtttagtcaacaagcaccaacgctcgatgaaatctttagaatgaaagtggaggaaggccatgtttaagtttaaggtgatttttaaacaagtatttctaaagaatattaaaagcccagcgtatctaatcatgattttgatgccaattgtgatgctcgggattacgtttggtgtgagtcgcttgatggatcatagcaaagaacccgttagaattgctgttttggcgccgcaaccagcagaacagagtgaattacagcagttaaaaggtaaaacatatcaaatcgatcagcagattacgactcgggaacaagccaccaaagcgctccagaaagagcgaattgatggctatttgttgttgagtgaggaaaaaggacagacaatcagtcgctactatgaacgaaaagatagtccatcatttgatgcgagtgtcttagagaatcagttaaatcagattcatttagtagctttggcgcaacaagcaggcgttgcacctgaacagatccagaaattgatgacgccaactgtcattgcaccagtgacggttaattaccagaatggtcatgaaaagatttcccaggaaaacactaaagaagtgggccaaattatttcaattggaattacggtcttaatgttcatctttatcgtgaattatgctggaatgattgcccaagaaattgcgactgaaaaagggtcgcgaatcatggaaatcattctatcaagtgtttcgattgaaattcaatttttcgcgaagattgccgcgatattagccctattactcacccaaattactgtctatattttagttgggattgtcgggtttcagtttttgaaacagcaactaccgttagcagagttattgccgattattcgtcgtgctttggttgcgccagcaatgtggtatgcaggagtctttttaattattggggtattactctacaccgtattagctgcaatgttaggcgctgttgtgtctcgaatggatcaggtacaacaagccatttcgccattgattttactgggcacattaagttatttgggtggctttgtactggcatcacagaccgatattccattattgcgggcggtgagctatgtgccattgttttcacagattatgttacctgtgcggctggcaaacggtgatgttggcgcgttcggggctagcatgggactcttcatagccatggcgacactaattggactgacttatttagcattaattatctatcgcatgaatattctagtttattcggataaaggtgtttttaaagcattaattgccacctatcagcaactcaaagaatcgcgccagtagaagatttttacaactaattaaagcggattgatggtatgatagagccatgtgattttagtagcaaggagagcgattgaacgatgcaaaaacgatgggtaaaattcggattggcactcttaggggtgacactggtattggcaggctgtcaaagtaagccagcggacaaagaaacgttggtcaaaaagccctatgaaaaaagtgattactatctcggaacgatttgtacattgcgaatctataataaagacaaggaagccgtgctagataaggcttttgcgcggattaaaaagtccgaaaatcaagcaacgttaaccaaatcaggttccgaattggataagattaatgataatgccggtgttaaacctgtacaggttagcaaagatatgtggccactaatggaaaaagcgttacattatagtcaagaatcggatggcgcgtttgatatggccattggtgcgatcacagatttatggcaaattgggttaccaggcgcgcgggtgccagcacaagcagaaattgaccaagcgttaccattagtcgattatcatgacgttgttttgaataaggccaaacgtacagtttaccttaagaaaaaaggcatgcgacttgattttggcgggattgctaaggggtacattgccgatcaagttaaacaagtttttaaggaaaatggtgtgacatcagccgttattgatttaggtgggaatgtgattgttatggggcattcaccattagggaagaacaaaccatggacggtcggcattcaagatccgaaaaaggcgcgtggagaatcagtcggtacgattaaaggccgtgatatttcggttgttacggcagggatttatgaacattatctaaaaaaagacgggcatacttacatttatctctttgatcgccatactggctacccatatgaaaataacctagcgagtgtcacaattatctcgcctaaatcagtagatggagatgccctttcaaatgctgtctttaataaggggattgtcgaaggcatgcagctcatcaacaacaaaccgaagaatatccaagccatcatgatcacaaaagataataaaatctatctatcaaacggtttgaagaagacgtttaaacttaaccaagattcaaattatcaagttgaaaaacaattaccaacgaaatagccgctaaattgcggcttttttgcaattatgggggtcaaagcattaacggaaaaagtggcaaaatgttaaaattgggaaagaatctgcttttgaggaggacaatgatgacaaacgtgcgaatgcaagatgatttttatacggcggtgaatcaagaatggttaaaaacggctgaaattccagcggataaaccagcaacaggcggctttgtcgccttggttgatgagattgatcagcaattaatggctgattttgctaagatgtcgaccgcaaagaacgcattgttacaacattttctagattattacgaactagctgcggactttcaaacgcgggatgcactcggtatgaaaccgatcctaccaatggtagcccgggtgcaatctctcgatagtttagcaacttacaatcgtgggttagctgattgggtactttccgggttaccaacaccatttggcttatctgtcgatgctgacatgaaagacacagcccatcacgcgttgtatgcggaagctagcgacttaattttgccagataagacctattatgaagctgacaatcccaatgctgaccatttattggccgtctttacggatatgatggttcagctcttgcagaaaattgggattgcgcccgttgatgcaacgaagacggttaaattagcgttggcatttgatcggtcactggcaccttatgtgaagagtgccgaagaagcagcggattacacgaaactctataatccacagcctttgagtgattttatgcaacaacaaacgacgcttgattttccacgtttatttagcaaggtgctacctgttcaaccggaaaaaattatcgtgacggaaccgaagtattttgcgcaactgagtcagcttgtgacagacgccaatttcgaaacgttcaaagcgtggctgttagtcatgacagttcgtagttggagcggttatctgaatgaagaggcacgccaaattagttcgctctatagtcgtgcgttatctggtagcaaggaagctcgtccacaacaaaagagtgcttactaccttgccttagggatgttcaatcaagttgttggcgattattacggtcggcaatacttcggtgaagcagccaaggccgacgtccaaaagatggtccaaaaaatgattggtgtttatcaaaaacgccttgaaaaaaatgactggctaaccgaaaaaacacgccaacaagcgattgtaaaactcaaccaccttgggattcatgtcggttacccggatcagattgcccctatttttgcgaagttggtcacagtacctaaagcagaagatgggacattatttgaaaatacagctgactttattcgaacgattgaaacggaaaattttgcgaaacttactcaaccggtggatcgtaataagtgggaaatgggcgctgccacagttaatgcctattattcaccttcgaagaatatcattgtctttcccgcggctattttgcaagcacctttttacagtttagaacaaagtagtagtgctaactacggtgggattggtgcagtgattgcacatgaaatctcacatgcttttgataataacggtgcgcaattcgacgagtatggcaacatgcataattggtggcaagaatcagatttagctcacttcaagacactttcggaagaaatgattgcagaatttgatggcctagaatatgcaggcgcaacagttaacgggaaattaactgtctcggaaaacattgccgatgcgggtggcttgagttgtgcccttgaagcagccaaagaagaacctgatgttgatttggcagccttctttgtcaattgggcaacgatttggcggatgaaagctacaaagcaatatcaacaattattgttaaatattgatgttcatgcaccaaacgcgttgcgggccaatattcaggtccaaaacttggcagccttttacgagacatttaatgtaacgaaagctgatcagatgtacttagcacccgctaaacgggttgcaatttggtaaattaaaaaggtgcgccacaattgtgacgcacctattttagtagtgatgggggataaagaaatgtcagaaaaaaaacgcatgattaatggtcaaatttatcgggcgaacgattcagaattgcgagccgatatgaaacacgcgcgcgtacttactcggttgtttaatcaaaccactgaagaacaacaagattaccgacgcgaattaaccaagtctttatttgcgaaaagtggctcagatttatatattgagccaccatttagaactgattatggttgccaaacacgcattggtgagcatgtgtatatgaattacgattgcatcattattgatgtagcaccagtgacgattgggaaccacgttttctttggacctcgtgtaggactctacacagctggtcacccaacgacggcacaagaacgccgggatgatctggaatatggtaagccaatcaccatcggggatgatgtgtggattggtggcaatacggttgttaatccaggcgtgacaattgggaacaatgtggtgattggttctggatcagttgtgactaaagacattcctgataacgtgattgcagttggtaatccatgtcgggtactccggccgattgatgaggcagaagaggcctactgggcgcagcaaaaagcaagttattttgaagcccttgctaatgaataagtttaccgagtagtgttaaatggagtagtcatcactaacaaagcactaagctaaatatcagcaaactaccgagaaaaagccgctagtactctataaaaagggttctagcggcttttttaaatgtttggtggatcaaactggcagttcactttgctgcgttaagaaacgcaagcgattagtgccaagtgctggtttagcatcttctttggaattggttggaaaaattggaccaatgccaatgtaatcaagtatcggttgattatgactttggtgaagttcttgttcagtgtggcaagatagaccagttattaagccgtgtgctttggccgtttcaattttatgccacgggtgatcgctttggccgacatgaataccatctgcattgatttgaagtgctaaatcgagattgttatcgataataaatgggacttgataatggcggcaaagggcttgagccgctgtcgcatactttaaaatcgcatcggaatcttgcagactaccagcacctttttcacggaattggaaacaggtaatgccggcttgtagtgcttgttcgagaatgtttagaaaatcatccataccggtattttgggtacccgctaccaaataagtttggaacatttcccgggaaatgttagtcatgatgaaccttctgataagcccagtgattggttggtccgtggccgtgaccaacagcaattggattagcaattgcggcttggataaaggctttgctaatatgaattgctgctttcaaaggggtgcccttagctagctcggcggttaaacaagctgaaaacgtatctccagtgccatgtgttcgtttagtagcaattcgtggtgtagttaaccattcatcttgtccatcagcgtagaggacgtaatcggcggcttgtgattgatagtctaaatggcccctttgataatgatattcttggcgcccatttgttggagttggtgggccgcttgtttgaaatcagctgttgtctttatgcggctgcccgtgagaacttcggtttcgggtaagttgggtgtcagcactgtggctagcggcaataattcagtacgtagggtatcgatggcatcgtcggcaagtagctgtgcaccgcccttggcaatcattacaggatcaagggtgagcggcccccaatcataatggcgtagattttcagcgaccgttgcaacatgttcagcatctgccaacattcccgttttgcaggcacgaattttaaagtcagtagccaatgaagcgaattgttgattgattagtgatagtggtagtggcagactggcttgaacgccaagcgtattctgagcggtgatcgcgacaactacattggttgcaaaaacatggcgctcttggatagttttaatatcagcttgcataccagcaccaccaccgctgtcagaaccggcgatggttagagcttgtgggaattcattcatgagtaggcacctcacttagttggacggtatttgctactttggctggggtaatgtggaataaataatcgattaattggggatagaaggtcccaggtagcggtgtttccattgctgtggctactagttcgccggcaacggcaaatgtggcggctgcttcgatagcggcttggtagggatctgcaggatgaactgcaacaaatgcaccacagagacccgataacatatcacctgaaccaacatgtgtttgaaaaagtgaggtaccatttgaaatcagcgtaacgcgttgaccgtctgtaataatgtcggtcggacccgttaataaaattatggtgtgtaaacgattggccgcggccttagcaataatgactggatcgctatttccatgcccggcgtcgatgccatttgcttgccaatctatcccagcaaaataagcaatttcacctgcattaccacgaatgagagttggtgtgtcaagtattaatagttgctcgataatttgctggcggtaggccagtgagccaactgccactggatcaagaacaacgggtttttgttgttgataagcggcggtcattagggccatcatttcttgaatctgtggtgcccacaaactaccaatattaatcgtaatggcttgtgcgatggtaacaattccctccgcttcttctggtgcattagacataattggtgaggtaccgattgcattttgtgcgttggcgacctgatcaattgtgacgccatttgcgacattagcaacgattggattgagcgctctaactttttctaacagtgaaacaaccatataaaaacctcccttattgaacggttgagaattttcaatcgttttttatttcggcccgttggtcaagtggttaagacaccgccctttcacggcggtatcatgggttcaaatcccgtacgggtcatcaataatgccggcttagctcagttggtagagcatcggtatcgtaaaccgagggtcacaggttcgactcctgcagccggcatcaatagcatgtttctaccaagtgctaatcgggataatcagcattgtactgacgttttgttagtataatgcttttttaatattcaatttgattgaaaagcaaccactaaaatagccagttacgaaaatcgtaactggctattacttattgttcatttgcccattgccataatagaatctgagtgcgtccagtcattttttcattggctaagatcgtctgtgcttcagcacgattaacccacagggtacttaaggcttcatccacttcaagtgtacggtctgtttgtttagcttgatcaagagtacagattgctagactaacggcgccatcagtaaggcctggtgaggaataacttggcgcaaagcaatgttcaacctcaataagagagtaacctgtttccgccattaactcacgggaaatggcttgtttaatcgactcagttggttcaactaaaccggcgggattaccatagacaaaatcattaaggggttgtctaaattgtttagtcagtaagacctgtgagtgattttgattgtagcagaacattgcaaccgctgaggcattagctggtcgttttaaagtctcgatggttaagttagagtcacgactgacaaaatgataaggcattaaatcgccgtgttcattttgatacattgcttcgtagtaagttagccaacgatcaggtcgtaatggaataagagatgttagtgtaaaagggttcatcggaatcagctcgctttctattagttcattgtactactgtttaaaggcaacaaaccagttttctaagaacatgttaggtatcatgagcattttctcatttaagaataagcattagtcattttaaatcataaaataacttattttaatgaaaaaatcagtgcaaacaatgcagttaatgttgaaaaaagaattgatttaagattaaaataagattataataacccttatagattctaagcgaatgataagagacttcttgtatagatgagtcgattcaatttaataactatcgaattcttagtttccgtaataataaagttttaaagtggggtattacaatggaagagaaacaagaaaaaacattctttgggcaaccgcatgggctatcaacactgttcttcactgaaatgtgggaacggtttagctactacgggatgcgtgcaattctattattctatatgtattttgctttagataagggtggtcttggctttgacaagacgactgcaatgtctgtgatggcaatctatggttcgatggtttacctagccagcgttgttggtggttggttaagtgatcggatctgggggagcttcaaaaccgtcttcatcggtggtgtcttgattatgttaggccatattgccttagcaatgccgatgggtgcgacagctttatttatttcaattgctttgattgttgcagggactgggttattaaaacctaacgtttctgaaatggttggtagtttgtatagtgaaaatgatcgtcgccgtgatgctggtttcagtatgttcgtcttcgggattaacttgggctcatttgtcgctccaattcttgttggggctgtcggtcaaaaaattgattttcacttaggcttctcattagccgctgtcgggatgttctttggtttaatccaatactaccgcggtcgttctcaattcagtaaagaaaattcaaaacctaatgatccaattgcgccagaagaattatcaagcgttattcgtaaaattgtgattggtgttgtggtcgtcgttgccgtagtattaggtatgcaatttacaggcaacttaaacattgataacattgtcttgatgatttcaatcattgcgattgcattaccaattgtgtacttctcacggatgttgggcagcaagaaagtgactaagaaggaacgttcacgcgttatagcttatattccactctttattgcagctgctatcttctggggaattgaagaatctggctccgttgttctagccttatttgcagaagatcggacaattctaaacattggtgggcatagcttagctgcatcaaatttccaatcattgaatccactatttattatgcttctaacgccattctttgtatggttatggagtgcttggaagaaacaaccatctgcacctggtaagtttgctgttggtttaatcttcgctggtttatcatacatgtttatggcacttcctggattattacacggtaccgctggccgagttagcccattctggttaatcggttcatggttcatcgttgaaattgctgaaatgttaatttcaccaattgggttgtcaattacaacaaaattagcgccaaaggcattccaatcacaaatgatgagtatgtggttcttagcagatgctgcgggccaagcaattaatgcacagcttgtgcgtttatattcaccacaaacagaaattagatatttcttagggattgggattgtgagtgcaatcttcgggatcgtcttaatcttcttcgttaaaccaattcataagttaatggaaggcgttaactaaatattagaaaaaatcttgattatttatgcaataatcaagattttttttgcattttggggttgatttttctgtcagaattttgtaaactaatatagttgaatcgatgagatgaaacgtatggaggagtagcgaagtggctaaacgcggcggactgtaaatccgctccttcgggttcggtggttcgaatccactctcctccacttgattgggctatggccaagcggtaaggcaacaggttttgatcctgtcatgcgctggttcgaatccagctagcccaatactttaaagacatcttgctaagatgtctttttttgtgtcctggattgactttcctccgctcgttcggtatccttggataaataaaaaaaggggtggcagaatgaaaattggatttattggtgtcggtaacatggcacaagcaatgattaaaggcttagtgaaagctaatcaagtcgcaacaacggatattttagtgcatggcggacatccggcgaactatgcggattttgtggctgaacaacggattacagctgttgcggataacaattcagtggttgaacaagccgacatcgtttttttagcggtaaaaccatatattgtgccacaggttttagcagaaacaaatgcagcctttaaagcacatcaaccattgatggtttcaatggcagcaggtttatcacttgataaattagcagaacaatctgctgcagatttaccaattctacgcatcatgccaaatgtcaatgtggccaaccgtacgggaattacagctgttgttgggaatgaacaagtcaatgcagaccaattggctcgtgtgaaggatgtccttgcacaactggggggcgtggttgaaatcggcgaaaaagatttcacaactttcagtgcgcttgccggtagttcaccagcatttgtttacctattcattgattcaatggcgcgggccggcgttaaacacggtttaacaaagaaagccgcaactgaaattgcagcccaagctgttttagggagtgcccaaaacgtgcttatgagtgatgattcaccttgggacttagtggatcaagtttcatcaccaggtggcacaaccgttgctggcttgttagcaatggaagaagccggcttaatgaccgccgtcgtcaaaggcatcgacgcaacaattgcgaaggatttagaaagccaaaaatagagtgctctcaagcatgtaaaaagcgtaacctgatacaaatactgtattgggttacgcttttttatattattttgtaaagtggaccatctcatgacagagttggtgggtgagtaagctactttctggtgggacaggatttgcgccgttagtttcaagggcagtaataaacgcatcaatcattggcgcaaagccccgcgtttcaagcgtaggcatccagtcagctgcaacttgaatgcgactgtcttctgtcgcttgtgttgtgtagcgcgttagattatcgacagtgaataacccgtgtggtgtctggagacttgcaatttcttgattggtaccactttgcatatttaaagtcgcgctgattaattggcgcggtgtttcaatggttaattgtgcgagttgtaaattgccgtttgcatcctgctgacagtatggacggattttgtaattggtacctagtgaatcagccaagaaaagcgccgtatcaatagtatgaatcatcaggtcataaatggcaaagggcgttggttggctcgttgccacgcgtgttttagtgatgttgatcagttgtttatcaggtaagtgatttaatttttgcaaaaatggggcaaaacggcggttgaagccgaccgttaagagccgttctttgctagccgcgagtttgtataattcggcgacttccagtggattttcacttaagggtttatcgacaaaaacgtgtaaaccatggagcaaggcctgtttaacatattgatagtgggttgcagttggggtgtgaatgaaaactgcgtcgagtggttgttcgagtaatgtgtcaaatgataggcagccactttctaaatgatattgcgcttgaagctgcgctaatttagccggttggcgcgtacataagacccaatcgacccggtcttgcatctgcgccattacaggtaaatatgctttttgtgcaatgtttcctagtccaataacaccgatttttaacatcattaaactccttaatatgaatggataaatatagtatagcaaattaacaagaaaacggttcaaagtttagtcggaatcccttgtttttttggtctataccatttatactagaggtaatttaaagatagaggtggatggataatggcagtaaaagtattaaaacatgcggtaatctatacaggtgacgacgttatcgaagacggttatattcgtttcgatgataaaattttggcggtgggcccaatgttcgactacaaggcacaagctggcgaagaaattcaagacgttaaaggcaagacaatcattcctggctttattgacgttcactgtcacggtggttatggttttgatgcaatggacggcgatgctgaccaaatcgacgaaatggcaactaagatgatgcaaaatgaaggggtcacaaccttatttgcaacaacgatgacgcaatcaaacgaaaacattgctaatgctatgcgcggtgttaaagcagcggctgaaaagaacccattaattcaaggtgttcatttggaaggcccattcatcgcaccaatcttcaagggtgctcaaccagaacaattcatcaaagatccagacgttgatttattggacgaatggaataagttatcaggtaaccgcgtgcgtttaattacttatgcaccagaagatcctggttcaaaagcattcgaagactactgtttagcacacaacatcgtgccttcagttggtcatagtaatgcaacgcgtgaacaaatgcttgaaagtaaagcaacgcacgttacccatttatacaatgcccaacgtgaattcaagcaccgcgaacctggcgttacaggtcacgcaatgttagaagacaacatgtacgctgaattaatcgctgatggtttccatatcgtgcctgacatgattaaattagcttacgaacaaaaaggtgcagaacggatcgaccttgtgactgattcaatgcgggctaaagggattgctgaaggcgaaagcgaattaggcggtcaaaaagtcattgttaaagacaaacaagcacgcttagaagatggcactttagccggatcagtgttaacatatatcgatgccttcaagaacatccaaacattcacaggttgtgaaacgtttgaagccgttatgatgtcaagtgtcaaccaagccgaagaatttggcttaacacaaaaaggtaaattagaagaaggtcgggatgctgatttcaacatcttagaccatcagcaaaacttagtcgcaacttacagctttgggaacggctatcaacattaatatttaggagtgtgtcccatggaatcacctgtttatattcaaattcataatcaacttaaaaaggatattgaagccggcaagtggtcgattggagatcgaattccttcagaacgggagcttgctttaaatttcgaagtctcacgaatgacattacggcaagccgtacaaacattagttgacgaagggattttggaacggcggattggggctgggacatatgtcgctaaccaaaaggtgcaagaaaaaatgtccggcgtcactagttttaccgatctaatgactgcccaaggtaagcagccatctagtaaaaccatttcgttccacattgccaacccatcacttagcgaagctgaaaagctccagttaaaagatggcgagcaggtgctccgcatggaacggattcgctatgccgacaatgtgcccatctgttttgaagtggcaaccgtgccacaaagcttagttgccgatttcagtaaagctgaaatcacgtcttccttctataaagcattagccgaaaaagggggctacgaaatgggcggtgcacaacaaaccgtctcagcccaactcgcctcagaacgaattgccgaatatctcgacattaagcgtaatggcccaatcttgaaattacgacaagtttccttcttatcaaacggcgaacctttcgaatatgtccgcacccaatatgtgggcgaacgatttgaattttatttagaaagataatggaaaaggattcagttgtgtagtaatacgcaactgaatcctttttgtataaaaaagtagacccgtttaagttggtctagcttttgaaaatattaatgctattggcaaattacaagtttaattcgaacaagctcggaatttctcaatagcggtttgtagctggttgatttttaatgggcgattattaattaagtctagtgattccagtaaggtatcttcagtaatttgactgaagcttgcacgttttggaaagaaccagcgtaacctacggttaaaatactcgttactaccacattcccatggtgaataggcatgacagaaataaaccgtcacgttatatttagcttcaagtacttgatagtttgaaaattcttttccatgatcaacggtgattgatttcacttgcgaaccgaagactcccataaagctatcaaatgcagtatttagcgcctctgaagtacgattagccactttaagtgctcataagaaacgcgatttacgttcaacaaatgtgactaaacaagctttagaagcacctcgtcctgataaaacagtatcaacttcccaatgtccaaaatcataacgattattaacattgattgggcgttgctcaattgatttaccagttataaatgtcccacgtttttctttagagcgtttctgataaatgttacggtttggtagattggttaaattaaagttgagttgcccagtattaagccaatgatagatagaagcagtcgtaaaattaaacatactagcaatcatctcaggtgacctagttgtccacgttgaaattgggttaaagtagaaatgctcaaagtaatatctcctttatggttggattaggctactaccattataagagattgctttgagttttttgttcggattaattttagaacttgccgagcattaatattttgatgacagttcatatcatattttatgacagattaaagtgtaacttctacaaaacatttgtatactttaagtatatcacacaacttatcgtctgtcaacaactatttttaattaattattacttagaagttataactccttaagcaacatataatatgttatcacgataagatttaaataacaagcgttttttaaaatcttttttatttcgtatcgctgagtcatcaaccatacgtccctcgtcgagacaacttttatatattaccaagattaacaggcgcggtcaagctttttattaaaaaagctttgaaaagttaccagcaacgtttcatcgttaccaataacccttcaaagctctacggtatccctattgtttaatgagtgattcaacatccaaaatcttatcaatccagtcaccttgatagaagtcttcttcatgagtaacaaggagtacgccaccctcgaaggcttggattgcttttcgtagtgcattcttcgtatcatcatctaaatggttcgttggttcatctaatagaagaaagttgcttgatgttaatagtagttcggcaatcttcaccttcgattgttcgccaccactaagttgtttcaaaggcttcatcgcttcttcggcagttaaaccagtccgcgataaaacttggcgtagttccttttgtttctgatcagggtattcgccttgtagatactgtaatggcgttaccatattattcggccacttcaagtcttgtttaaagtaaccaaacttcaccgtactggcaatctcaaagtccccatcgattgctggaatttctttaatgatcgttttaatcaacgttgatttcccaatcccattaaaacctttcaagaccaccttctgatcacgaccaattgaaaagttcaacgctggtagtaacgcgcgatcgtaaccaatctccaaatcattagtcgtcaatagaatctgactggccgttgcatgatatggaaagcggaagttagccttcacgcgattacttggtggcgtcaaaatatccatatgtgccaattgtttctcacgactcttggcaattgtcgaacgggagcccgctttatacttgcggatataagctttcgttttttcaatctttttttgttggttctcataagcctttagataactagccttattctcttccttttgccggaaggcttgttgtagtgtgccggtatacttcgtaatcttaccgaattcgatatcggcgatacaggttgtcacccgttccaaaaagtcataatcatgggagattgtgataaaggcgccttcgaaatgattgagataatcactcagccaatcaatgtggttcgtgtccaaatagttcgttggttcatccagtaataacatatcgggttcttctaatagtagtttcgctaaaataatcttcgaacgttggcccccacttagttgtgatacatcatggtccatccctaatgcatcaatccccaagccagtggccacttgcataacgcgcgtatcaatatcatagaagctttttgcctctaatagttcttgaatcgcacccgctttttcgagcaattggtcatcaaggctctctgcatagtccgcataatattgactcattaatttttctttcttatataaatccgcaaaagccgtcttcaaaaattcaaagatcgataatcctggtgctaacttcgcatactgatcgagataaccaatcttcaaattcttttgccacgtcacttttccttcatccggaagaatgacgcccgtgaggatattgattaacgtactcttacccaccccgttttggccggtaatccccatatgttcgcctttattcacttgaaacccggcgtcgtcataaagttgtttatctaaaaactgttgtgttaggccttcgacttttaaaatactcattgttttattcctactttctttccaaataaaaaacaggggcagcatccgctacccctgtcatgattacaatcattgactatcgaccactccatccatagtcactacccaaataaaccactgtcaccagtcgttaaatccagtaatgtcctatagatgacttttaatcaatattaggctctgcacgatgcgtcatcttcaaatatacagagcgaagcttcataattaatggtcgttcaattaacatgtaatcgcacccttcaataagttagtcctatcctaacatagaacaatcgtccatgcaaaagccttagctaacccgtgcacgcaacttcgctaacagctgtgcgcgtttgcgccgagaaatgattagacgcaattcaccgcggacaattggataatccttagccctaccatgcatcattgtcgctaagtcttggcttgttaatccttgattagccacttcaattttgatcatttctgctaaatacgtactatagaatgcattaaacccgacatataagcctagtactgcactgattagaatcgcaagccataaattgaaattcaaaatcgtctttaaaactaacatgccacaaataaacgcaatgaccgtggccactatccctaatatgattgtatgtcttggggcgtctttcatctgctccaccttcttaataatgattaatcgtttatatttcatttatattatacctaattttagccgcaataagcagtaaaatcacttaattcttcaaattaaaaaccgctaacgtcaagcgagacagtcaaccacgtttactagaatgagaggctatgtattgtaaaaattgtgtatatattgtaaatttttctgtttttatccccgtaaacagtctagaattgtagtagtgcttttttgaataatataactatattaagaaggataattgaatctatatgaaaaacattgctttgaacatccgagattttttcttagatgacaaactactcttagccgctgccatcgcagccattgtcacctcatttttcaaccgcccacaacttagttacgttaatttccacgtgatcgtcagcgtcttttgtattatgacgctcgttcaagtttatcaacggctccacgtgcttgattacttcgctcgcgagttaattatcaaaagccgttccaaacgagccttgatgcagatgttattagcactaacgtttgtcggcgcgatgttcttaaccaacgatatgacggtattaacgttcgtcccgttattcatcttaattgcgcgtcaacttgaattttcaccaatcttaccggtgacgctcatcacgatttcggctaacctcggttcttcattaacaccgtttgggagcccgcataatattttccttgtttcgttttaccatatgacgattcgccatttcttcgaatattcaattcccgtcttgattgtcagcgtcattatgttggcagcaacgaccttcctcttcccaaaagaacccatcaaacttcacgggttacatcccgttgaagttgaaaaagggccactgtggtatttcgttccattaacggttgtcgttttcctcgcagtgttctcattaattccattatgggtgacaccaattctagtgattatcgcgattctagcgtttgatcctaagttattcaaaacagtcgattacggcttattactcacattcttctgtttcttcatcgctgttgggaatttaagtcacatcccaacgattgccacattcatgcgatcaattgtcggaacagcaaaacaaacctacatcaccgggattatcagttgtcaattgattgcaaatgtcccaactgaaattttactttcaagcttcactaaccacagccacgcaatgttcttagccatcaatatcggtggggtcggcacaatgtttgcctcacttgcaaacttgattgcttacaaacgatttaagaaaggctggggcaaagaccttggtaagttccttgtcgttttcactggcatgaacttcttattcttaatcattttaggggtattcggctattttctcatctaattcttaaaaacagggcaactatctttacgatagttgccctgttttttgtcattttaacagtaatcgtcatgatagcattcccattcgcgtcttactgccgatcaacgccatcgtgacgccctttaattaagttcctaaattttacaaacatatgactaacatgacaaattaccccatttctgtaaagaaactgctatttaattgacatgcagcattgatatactctcctagttccaaaacttacctaggagtgacgctttattatcaaaaacaaaccattcttgttagctatcggccttatattgctgatgctaattacaacgaatatcgcgcgtgccgcattaaccaatgaagcagcaccagaaacgaaccaccctgtccaaaagctgatgtcatctaaagccattgaacaattcacggggcaacctgcccaagcagctgaaacgtcactggtcaaacacgcaactgttctaccaacagacaaacccgttagctgtccgattcatccagatcctgattccgcagaaattaaggaaccaacgcccgcccctgagccagaactagttgcggccccagcacctgccgaaccaaccttaattgacaaagggacattcaaattaaccttttacgatcccgcggtccttggcgcaacaagtatgcccggtggaatgtacgccggagtcgctgcgcacttgggcgttatcccccgcggctcacaaatcaagatcacattaagtaccggtgaagtatggtaccgtgttgtcaacgataccggaaccttcgccgcttctaactcacaacaattggacgtcgcaatgccaaattgtgacatcccctctgccggtgtcttaaatgccaacgtgcagattgtccaacctgcttaattcaaaaaaagccaaccattcagatattacctggatgattggcttttttgatgttcaatttagaaataatcccataacatcggtttcgtatgactaaacgcagcactgagttgagcgatttgctgcggtgtcccttgcacatgcccaaagtgtgcttgactctcaagtgtgcgataccccaacatcgccttagttagattttgaatcgtaacggtgatgtctgcggtccccgttgctaattttgtcacagcagcttgtcctgcatgaatacttaactgccataagccggcattttcaggtaagaaatcatcttgaaccgcaatcgttaccgcagatagttccgctacttgataggcataacgcgcgaagaaatcagctagtgacacaatccgtgccatcatataagggacggttgtcgtctttacgattgtgggatcaggcaataaatcagctagcgactcagtcagtgcactctcatactgaattatcgcataagctgactgatgcttaagaataaagctcaatagctgttcttgacttgcaactgtcgaggtcatcagttcttgaatcacaaacgtctctggttggcgcgtataaatcatataccccgcgacccgtcctgtatcttctcgatagaccgccacttcccaatcactatgcttcataacatcatattgccaccaccaatcagtccgctgcacaccaccgacttgattgtccggatgctgattgaagaacgcatcaatcaacggcaccgcttgcgccaatgtcatccgtactacttgtcctgcactcggtgcaaatttcaatcgtggtaagtcagccgtttgaatttcaaagtgcgtccgatcaaaagtttgttcatagccaaaccgacgatagaagccgtatgaaaatggcgcgagatacgaaagcgtcacaccttctgcacgcatgtgttcaaacgcgagttgcatcaatgctgcaatcccacctttgcccgcaaactcggggtaactcgcgacataaccaatgccactcatcttaaaggtttgcccattgagccgtacgtcaaacggcgtcgctaataagccacttgccaaccggccgtcatcaaaaacgccaaaccctgcactatgtgtatacaactgtttgaagaattcttggcgcttagcactatccggtttattaaacgcatattgtgctaattcataaaatgctggttcatctgtttcaattaactttcttttttcaaccactgcacattcctcctgccatcacttatctttcactataagtgagcgagcaacaagatgcaagcgccacctttgtgattagaccgctttttgcgcataaaaaaaacgaccttttcttgggagtggtcgtttttttatagggagaaatctatgggtattagggagttatttcgttaacgaaattgcacgaagttgttgtgaattcactagaattcgttgcatcaactcgtgaaccgtaaaacgatcagttggtgcatagttcaagattaagatatgcacagtttcttcacatttctcaatgaccttaccgatatacgtcgcagacataatttcgtttgattggccgcgaactaaatcacctacttgaatcgccatgtccagttcacctcgttaatttatttaaccatgacctcattataacgaaaccgctttataaaatcaactatttacttatcgtcataattagtagatgcttgtgattggttaagcagattgcctatttttgaatcttgcgatagtcagcatcgaaataccggccttcttgaatatcttcaatcataccttcataaggcgcttcgctaattacgtcttcgttattttgtcctgcatcacccatataagtgattgtggcaaattcaggcactaacatcttaggatatgtttcatatttttcacgtgattcttccatgagtgcaatgtgatcattttggtaggtcactgtgatttctggatgttcttcaacccatttagggaagaaaatcatgccgtgtaacttgttttcgtttggcatgaagtccaacgcaacatcagtcccagttggttctgtccaagtaatcttgaagacgccgtccgttaacttaacgatgttggcttcttgatcacgaacccaacgacctgcaaccatcccaccatgaattcggtagtcaactgtgtggtcgttctttgcataccattcatactcccaaccattatcgtaagtgtaaatgaaatgcgtccctaagaaatcttctaattcttcgctgccgaaagtcacaacgataattctttgaaagatccttcaccctttattcaaacgaacatcatcggttcatatacgttgatcgaagcttgtcgcaagtataatgtgcgttatcaccatgtttcaaccgatgaagtatacggtgatttaccattgcgtgaagacttaccagggcacggcgaaggcgttggtgaaaaattcacgcctgaaacgcgttataacccaagtagtccttattcatcatcaaaggcgagctcagacttgttagtccgggcatgggtgcgttcattcggcctacaagcaactatttcaaactgttcaaacaactatggtccttaccaacacattgaaaaattcattccacgtcaaattaccaatattttaagtgggaatcgaccaaaactttacggttcaggtcaaaatgtgcgtgattggattcatacgaatgatcattcaagtgccgtttgggcaatcctaaccaaaggtaaaatcggtgaaacctacttaatcggtgccgacggcgaacaaaacaacaaagatgttttggaattaatcttagaattaatggggcaacccaaagatgcttacgatcaagttaaagaccgcccaggtcatgacttacgatatgccatcgattcaacgaaattacgggaagaattaggctggcaaccagaattcactgattttaaatcaggcttacaacataccatcgactggtatcgtgacaatgaagactggtggcaagcagaaaaagcagccgtggaagctaactacgctaaaaacggtcaataaaaataaatagtttcagaataggatgatttaataaatggagaggattaaaaatacaaatttgtataatcgttttctaacatcgccaatgtacaatattgtgatgggattaaaacatcctattttgcttggacgatatttgaagtatcgaggctctgctgataaaccaaaagtagttggtcttgaaacgactttaaagcaaattacagtgcaaaaaatgtcggtcactcgttttggcgatggtgagttaaagtggctattgaatgagaatagctatgcttttcaagaaggatccgaagcattgagtgaacgtttaaaagaggttattacagcgactgatgcgcctaagttagcaatctgtataccagatgtttttaacggtctcagtcagtatatgccccaaaataaaaatgcttggattgaattaatagcgcgttacaatcatgcttggcgtccttatttacaagctcaatcagtattttatgatgcgaacatgagtcgcttctatattgaccgacgtgataaaagtcaaacggcgtattattttgaattactcaaacaaatctggcaagatcgtgaagtagttattgtagaaggacaagcaacgcgctttggtgttggtaatgatttattgagtaatgctaagtctgttaaacgcattttaggccctgcgcagaatgcgtttgatcaatacgacgctattatggatatcattaaggagcaggtagcatcagatgctttgattttaattgcattagggcccaccgcaacagttatggcttatgacttggctaagcttggttatcaggcaattgatataggacacgcagatttagagtatgagtggtatcaaatgaaggccacacaaagagttgctttaaatgatcggtatgtgaatgaagttgaaggtggaagtcaagtggctgaatcggaagctccagattatcatgctgaaattatcgcaacaatcagagaggattagttatggaatcaaaaaatcgtaatatttgtgcggtcttagttacttataaccgactagcattattgaaagaatgtttagcagcattagaaaaaaatgaaaatgttgcccacattgttattgtgaataataaaagtacggacggaacggctgattatttagcaactttatcggctgataagtttattatcaagaattctgatgaaaatctaggtggcgctggtggttttgcacatggcatggtcatggcttatgaacaaacagatgaccaatatttctggattatggatgatgacacgattcctaattcaaatgcagcacatcagttattagataaagcagcattcttaaaagatgattttggcttcttatgtagtaatgttcgctggatggatggcacatcatgtaatatgccaatgcctgcatttgaatggccagacaagattaatgatgggttagtgtctgtcagccaaggaacatttgtttcggttttcttaacccgggaaatagtaaaacaatatggcgtgccaacgcaagagcttttcatctggggagatgatactgagtatacaattcgagtcagtcaggcgaaatcatcttattttgtaattgacagtgttgtggtacacaagacacctaacaatttaacggatattactatttttaacgattcgaaggatcgtattaatcggtatttttatctatatagaaacttaatttacatcagtaagttatataagggaaaaggggcaaccatcaaattaaccattcgtcatattctttatgcattttcaacgttaggaaaagctaaggatagtcgttttaaaagggctggtgctatcttaaaagggacgtttactggtttagggtttaatccgcagattagacgagttgattaatattagatagtaggtagggtatggaacagttattaattttaattagtgttattcaaaaaaatattttaaatatcccattcttctcacaagctgcttttttaggcatacttattattctttatcgacggttagtggaccatatttctttagaaccgttggataatttaaagcttagacactatgccttcatcgggttgcttgcacttagccaactactagcttttattggattaacaaatgaaggctatggaatcggtagtattttaaagaagttcattattgcgatgattacagttgctaattttttgattctatattttgttatgaacctattgatgcggaatgattatcagattaaaaagattgtaacggggaatttttgggcatttgtcctattgattggcatttgtctggttcaaattatttatgtatttttaggtggtcgtttagagagtatcgtcgaattaatcggacggtatctggaatatcataatattctaaatcctggttcttttgaaaaaattagttacacgcaaagtacgcaacgggtaaatgggttatatgcggaatctggatttttagcaggagtattggtgattggttttgcccccttcatcattagcgcgatgaaaaataagatcaacctattttttccgaatagtcgctatcatggctggttttattatgggttattcgctgtattgatgggcgtgttggtgcttgctaagacaagtaccggtattctggcagtcgttgtaatggcgttacttttactatgggctgtcaaaggtcgggaacggttaaatctaatcgttctgtatgttattgctggattattattagcattaatcgtaatgagagtaccagcgttaaaaaatatgttattaagttttacagttggtaagacggattctgattcaacaacaatgcggctattagcaacacaagcggtgtttattactgttttaaagaatccgttgattggtgttggctttggtcaaactagtcattttaatttcatcaatgcaccatcatcagttaaacaactagctgaatatcaattatttttaaagaataaagaatttccagatcaaagtgcgtggggagctgtgctagcgcaatttgggctgattattggaatcattattgtgatatatattattcatctattactcgatttgaaaaaatcaacgaaatggttacaaatacatcaaatcacaggatatcagtacgatcaagcgatttatgatagtgccgtttatttcacaattatcttcttagtattaggaatgttatccatccaatggtcatttgatttatttattttaatgtttttcttctttgttaactatagacactatttgaatcgtaaaatcacaaataatttaaaagatggtgaggtatatatttatgactaattatttagtagttggttctggcctgtttggcgcaaccttcgcatatgaagcggccaaacgtgggaaccatgtaaaagtaatcgaaaagcgggatcacatcgctggaaacatctatacaaaggaagttgatggcatccaagtacatcaatatggtgcccacattttccataccagcaacaaagaaatctgggaatatattaaccaattcgcagaattcaaccgttacaccaatagccctgttgccaactacaagggtgaaatctataacttgccattcaacatgaatacgttcaataagttgtggggcgtagcgacacccgctgaagcggccgctaaaattgctgaacaacgcaaggtgttaggtgataaaacacctgaaaatttggaagaacaagccatttcattaattggaacggatatctataaaaaactgatcaaaggttatactgaaaaacaatggggccaaaaagcaaccgaattaccagctttcattattcgtcgcctcccagtccgtttaacttatgacaataactacttcaacgatacataccaagggattccaattggtgggtatacacaaatcatcgaaaagatgttagatagtgatttaatcgatgttgaaactggtgttgatttcttcgataaaaaacaagaatatattgatcaatacgataaagtcatctttactgggatgattgatcagttcttcaattatcaattaggcgaacttgaataccggagcttacgttttgaaacggaagaaatggatattgataactaccaagggaacgcggttgttaactacacggacgctgaaacaccatacacgcgggtgattgaacataaacattttgaattcggtaaaggtgacaagaacaagaccatcgttaccaaagaatatcccgctaactggtcgcgtggcgacgaaccttactatccaatcaataacgataagaataaccgtttgtacaaagcttaccgtgacctatcatcgacagaacccaaagtggttttcggtggtcgtttaggccaatatcgttattatgatatgcaccaagtgatccatgcagcattacaagtcgttaaggacgaattaaaggattaatcaatgaagattattaagaactatctctataatgtgttctaccaggtatttgtactgttagtaccactcattacgatgccatatattgcccgggttttaggcccaacgggcgttgggattaactccttcaccaattcaaatacgcagtactttattttaattgggagtatcggggtatctctatatggaaatcggcaaattgcttattatcgagataatcgagcgaaagcttctcaaattttttgggaagtttttctaatgcgattagtgacgattgtggctgcattagcacttttctttggctttttatggtttgttaaagactatcatcaagcttacttgatgcaagcgattttgattgttgcggcagcatttgatatctcgtggttctttatgggctttgagaacttcaaggtaacggttttacgaaacatcatcattaagttaatctcgcttgcctgtatcttcatatttgtgaagaaccagggggatttaacgttatacattgcaattttatcaatctcgcaattgattggtaatttaacgttattcccatatttaaaacactacattgatatgcctgactggcataaattaaaaatttggcggcatttccaaccatctttagtcttgtttattccgcaaattgcgacacaggtctatttaatcttaaataagaccatggttgggaaaatggtttcggttgaagctgccggcttctatgataattccgataaaattgtcaaaatggttttagcaatcgtgacagcaacgggaactgtgatgttgccgcgagttgccaatacgtttgccaaaggtgatcacgaacaagtgaaaaagtatctttaccagtcatttgattttgtcagtgcggtttcagtccccatgatgtttgggattgcagcgattgcgccgaactttgcgaccatgttttttggcaaggatttcgccgctgttgggccattgatgatggtcgagtcgatcgtgattctaatgattgcctggagtaatgtcttgggtgtgcaatacttgatgccaaccggacacaacaaagaatttacgatttcggtgacggttggcgctgttgtcaatattatcttgaatgtgccaatgattttatggttagggacacaaggtgcaatgattgcgacagttatttcagaaatcagcgtaacggcctatcaattctatgtcgttcggcatgagttaagtattcgacaaatgacggcggaagtgtggaaataccttttaggtggtctgatgatgtttgccgtagttctttatttgaacctaacgctaccatttagtatgttacaactagttttacaagttggcgttggtattttgttatacggcgttgtattatggttaacgaaacctaaattattgaattatatcaagcgaggagatcactcatgaaaattttaatcactggtgcaaatggtcaattagggaccgaattacgacatttattagacgaaaaccaaatcgaatatgtggggacagatgcagccgaattagacattactaatgcagacgcagtcacaacatactttaatgctaagctgtcctcagttattgccattgtatatacctaacctcttgtagtttgttaatggttcattataacatttaaaacaaaaacagcccccattatctaactagtagataatgggggctgttttaatagtcttttagaggggttattatttaattatagcccctaaattaaggaatgttttagtgaccacctaggatcatagttaattcatagcaaaactcctggtattttacttagaagtcaataaattaattggactgctttatggtggtaagttatgacgtattttaacacctttaattataaggcacaaaaaaagcgacacaattgttaagttgtgagctggtttttcgtttgtaccataacttgaaagcacttatataaatgaacatagaataaattacggcttaatgaacaataaatgcaaatgattttaataatcttaataagaaaagaagggtgttcataaaatgaccattttctgaacactcaaatattgaaaaaatatagctcattttatgtcttattatttgatagtggtccacctcgtcgtaacgtttaaatcctgacataaaagtcctttcatttttctgtcttcctagacagattataacacacatatttgtgtctacttttatagtatagctccacttaaagcaaaattacaactcagagaaaaagaaacagaactagaaaaaaattctataaaagagaaatatgaaatcgaaatcaagcaaaaagatgaaaccattgctttttataaagattttaaagcaaaacaatcaactggaggcaaactcaattagataattggtggcatagtattctggattatgaaaaagaaacagaaaaaaactgggttgtagtacctagtttttattttgagataatattgagatagtatattataataatgatacgctaatcagttgaagtcaagtcgataaagtttgaacgatttttaaggagaaaagatgagtacatcaacattggaatcacgtgagaaacaataatgttgactatacaagcaaaaaattgattttatgaaattttttttgcttttttgtatattactttccctcatgaattattgtttactatgtaaagaataaatttgtattttatagaacactagctttaccttaagctcggtctattatgaggagattgtatgactgaatgtctattattagcaaaaataaaagcacttgcagcttcgtccggggcttcattaaataatgctgaaagagacctagtaggttatccaagaaatgagttaagcaattataatcacgtgaaaaaaccatctgcagagcgaatattagagctttcggcatatttcggagtatcaccagagtaccttatggatgactctttggaaaggatgatttattcaattcctcgtcttttcgatcatttgaacaatgaacagaaagaagagatgtatagactagcccaaagatggtcacaggggagtagtacgtatgagagaggtattgtggagctttccaacagttcgcaagcttattaacattctgtccgcattaacatgttaatacttttataaataaaaaactccctgcagctagaagtttctatcctttcaatccattgacaaagaaacgggtaatcaaatcagttcgtttgaaaagtgtatcggcagataagcttttcattccttcaaggaaaatattaatgacaaacataaagtcttcttttgtcagatttgaatcaatcttaccctcactttgtcctttttcaaaaagttcattgtaaatttccatttgagcgttgattgcatcattgtcgaaaaattcgggatcgtgcgtatattgtgtcatcagattttctgagaaaatcgaactgtatttttcaagttgggaaattttcatgcgtgtaatggcttcataagtttcctcgaaatttaagttgcttttaataacctcttcgatttcttttgccatgtgctcaaaagcgcgcataatgacgatattcatcagatggtttttgtttttgtagtatttgaaaatggtaacctttgatacgatagctttttcagcgatttcatcaaccgtaatattgttaatctctttttcatttaatagagcaaaagtcacttccaaaatggcttttttctttttttccgtttggttcattctttataacctccgatttaatgcgatttgtaaaatatatatggtagattgtaaaattaaaccgaacacttgaataaaaaagccgcagcgcctttaatggtaattgtccaaaacaaccataaaggaactgcgactcatgactagtttatcatctcaagaacgtactgtcattcaaactttactcgaattgaattattctgttcgtgccattgcgcgctttattaaacgctctccttcaaccgtttcgattgaaattcatcaagttacaccctataaagctgagattgctcatgcgttggcattgaaaaaacgtcatctacgtggtcgtcatgacacgctaacaccagctatcgctgtctttttgaatcaccacattggtatattgaagtggtcaccagaaaccgctgcgcatgttttagggttacctttcaaaacgatttataattggctcaatgctggtcgactcaaactatcattggctgatttacctgacaaaggtatccgtcaaaaacgtcaatctgatggtagacgacaagtatttgtgcatggtcgttcgattgaaacgaggcctgaaagtgtgaaagcacgacaaacctttggacattttgaagttgacaccatgcaatcgggtaaaagacgtggcgatgtgctggtgacaattactgaaagactaagccgacaacatatcgtgagacgggtcactgggcgcaatagtcaggcagtgacaccagtcttaattcgtttttttcaagggatcaaaaatgccaagtcaatcactgttgatcgtgggcgagaatttgcaaaatataacgaaatcgagcaaaaactaggcattccagtctattttgcgcacccatattcaccagaagaacgtgggagtaatgagatattaaatcgatacgtccgtcgttttataccgaaagaacgcaaaattgaaacagttagcgccaaagaattagatcaaattaatcattggatcaatgcgagaccaatgaaaacactcaactggcaatcaccacgaaaggtttttcagcagtttgcagtgttcggttaattcttgcaatctaccatatattcattatatcatcttttatgaaccacttccataaaaacggtacaatatgaacccaatgttgttgatagtccaaaataaactatttttgaaaaaagttaaaaaatatacttttttcttgaactgtttaaaaataagtagtacaatatgaactgcaatgttagttaaagttcaaaatcaatttgacattaaacttgctcatgaaattttggaatacgatcattttaaaatggttagagtcattattggaggaaaatattatggctaagatagttgaagtaaaaagacttcaaaagaagtttggtaaatttcaagcacttaaagatgtaactttcgatgtcaacgaaggagaagttttgggttatgttggaccaaacggtgcgggtaaatcaacaaccattcgtgccttgctcggaattatcaaagcgagcggcggttccgcaaagatttttggtaaagatgtttggaacgattctattgaaatccataaaaatattgcttatgttcctggtgatgtgtatctctggccaaacctttcaggaggcgaaattattgacatgttcttgcatatgcacggcagttttgatgcagcaagacgtgatgaattaatcaaaaaatttgagtttgatccaaagaaaaaagcgcgttcttattcaaaaggtaaccgtcaaaaagtagcgttgattgcagcattagcaagtaatgcagaactttacattttcgatgaaccaactagcggacttgacccattaatggaagctgttttccaaaatgaactgatgcgtatcaaagctgaaggcaaagcaatcttactttcaagtcacattctttctgaagtagaacgtttgtgtgataaaatcgctattatcgcagctggtgaaattgtcgaatacggtagtcttgaagaaatgcgtcatttgacacgttacgaattcaaagtagaaactaagaaacctgccgtaggacttgaacgacttaatgcagttcataatttgaaatttgatagtaataaggccacattccaggcagattctgacaaggttcaggaaattcttgcagtcttgactgaatatgatgtggtcaaaattgacagcaatcctcaaacgcttgaagaactgtttatgcaccactacacacaaggacgcggataagtcgaattgaatcgagctcgtcctcattgaaatctagaacctgccgttgacagaaacatagattccactatttttcaagatttcaatgcagtcagacttacatcttgtttataggagagataagaaatgaaaccttttaataatacaggcctaatgatgcgctcgctttttaagcgcgactggttaaaattcattttctggggcttggcattgcttgcctatgcagcttcaggcgtgggcaaattggaacttgcgattaccgcagccaatcggacttcaatgtacaccttctttagcgggccagcgttggtcagcttatttggaccaacttcggttacaaatccagataaatttacaggtgcggcagcatttggtggcttaatgccgttaattacggtcatggtgtttgcgattgtgacaatcgtttacgtggtcaatcgtacacgtaaagatgaagacgaaggcattaccgaacttttacgctcattccaaataggaaaattagcaaatacaacagctgttgtcattgaagttctacttttgcaaattgtcttgactttcttgctggcaggctctattcaagcacaaagtgcggctggaatgacagatatgtcaaataatttgttgttcgcagcctccatcacaggtcaaagcttcatgtgggggatgattgcactcctttttgcgcaaatcttcgctgaagctggctctgctaaaggtgcttcgattggtgtattcttcatactttatatcgtacgtatgggtacagatatcagtaatatcaagctttcatggtttaatccattgtcttggagttatttgacagatgtttatgtcaaaaataactggttacctgttgtttttacagtcattctcgcctttattgttttggcttttgcctatatgttcgaagtaaaacgtgatgttgcagcaggttatatgcctgaagcacgcggaaaagtacatgctggcaaaacgttgcaaagccttacaggtttagttttacgtcaacaacgcacagcagcaattgcatggattatcggccttttcgttctcggcatcacttatggttcaatgatttccaaaatcggtagtctgattggtggcgcctcatcaagtcaaaataatttacttcaaagagaattacaaatttcagcaaatgccaattcaacaatgatggcgcaacaattccttggcacagtttacatggtcattgcaattatcgcgacttgttttgcgattacaagcttgacacgtatggtatccgaagaacgtcataatcgtcaagaacaactttatgctttacccttgtcacgtttgaaagtctttgtaaactacacgattattgcttgggttcttggagcatttgcaatttttgctggagtatttggagtttatgtttcacaaatgggcaataaagaggctttgtctgcaggtacaatctttggcggtggcatggcatggatggttggtttgttgttcgtactctctatcttgagtgctttgatggccttcttgccacgtgcaagctttacagtttggatttatgttggcttcacattctttgttggctttatcggaaatatcttacaatttccagattgggttaaacacctcaatattttcaacaatttgatgaagacagcaagcagcaccgttcaaccaaatacacccaattggacaaatttggcaatcatcactgttgtagcactcatgattacaattgttagctacgttggctaccgtcgtcgtgatttgattggtggataaataaaagaaaatgtgaaaatactggctcttgacgaaattggctcaaaaacagaaaagaaattccagcatatcaaaatgggttctgttgcaaagttttaaataaagaataaaatcccttacggtatctatgatttaagctgggattcccaataataccttgatttcagtacagaccgaaaacccgaagagagtgccttcttttcgggttttcttatataatcctcgaatggcttccatgcctttaatcgtgggtgaggcagtgcgtaaacttcgatagaatttattgcgtctctttactggacgatggtcttgttcaatcaaattattcaggtatttaatggtacgatgttctgtcccttgataaaagccgtattcttttagtttcttaaaggcacttgtaatagagggggctttatctgtgactacaaccttcggttcatcaaactgttgatataaaaccgatttgatacaaataacgaaaggaagtagcacttatgaaataccaattagagtacgataaactagcacttactgaacctttttactatgaagaacgaggagaatggcttgattgtctgcagatttggttacgattctctccgatttttactgttcctaaaggcgatacaccaatagaggtaccattaaatttgaaagatggcacgaaaaaaatgctttctgatttagttagagttgcctttgatggtaaaaaatttacttttgagaacgttcaagatactttggttcaatatgaaattgttgcatacggtcgaggtctaacgaatgataataacattcatataactgatgccaaagaatttactgaaatagtaaaaaagtataaccaatatattgaaatagatactcggttacaaaacctagcatattcttggcatttattagattaatgctagtttgttatttcatcaagctaattgcatagatctcattaatggctataaactcgccaccaatcatcaatttatcctggtaatagccttctattttcccctcaataaaaggggccacataaccattttgatcttgcaggctgcgttcgactctaacaacctgactcttttccaaagcctgacttaaacagctttcaatctcgttaagcgccatttgttcactatgccggcgatttaatttaatttcgtcttcacgatctaccttattcaaactagccgtatgatcactcaagtaaaatccttgccacttcatcatgcctcggtcttgatattggtttaaaaactgtgttaccaggtttgggtcaaattcttgtttattcataggaattccctccagcgtggccaccaactaagccagcacgttgtacagcggttgcgccaacagatttacttgataacttaatcagtgatgtgaaaccatatttttttcgaatgtcatcaaccgtacgatcaagattgcgattttttaaagttttgtactttgtatcaaacaaattcaattgcacaacattatcgtcaactagaccagcacagctaattgagatgttccgaacggcttcgccttgccacttatcacgaaaaagcgttatagcataagctgctagaagtccgttatcattggtggcattaattttcatagagtggccaaaaccacgtttcctggtttcctcctttgctctgaaagaataaccgattcctaagctaataactgtagccgctttatgatgtgaccgaattcttgtagccacctgttcggcgatttcacgtaagacaatctctatttcttcttgcttggtataatcgcgtggtagcacctgactgtttccatacgatttagccttaggtacgtacttatcacgaattaacgcccgatcgataccccaactaaacgcatataattgcccgccaataaccccaaatttctgttttaaaagaaacgggttatagtgggccaagtcatacattgaattgatacctaacttatttaatttctcggctgtcttatggccaattgaccaaagatcatcaagttgtgtcactggccacagtttgtcctgaacgtcttcatagtgccattcaccaattagactgtgggtacgtttaccttccacagctcaaataaatcattaatcggatagttaaaaaacagcccaaaaccgccagtgttgatcgcaaggaagtcctgctttcagaaatcaaagatctactcgaaaatcagcaaaaatgaaaacagccggcttgctcaaattactttcaaaccccaattaattgcgattaccggatatttgaactagaattaacttataaatgattttcacaaatggaaatacttgagaagaggttttgttatgagaacgtttgcgataagggctcgtgatggggtcatggaaatcaattattcagagaattccaataagcccccttttaggaagtttatgatcacctacaaccccaaattttcaattggcgataatcttgagaacattaaggctgccctcactggggtgccaattgatgcagcaattattgaggattcattgaactatgaattctctgacacgatcatcggtattaatcatcaaaagatcgatattggcctagcaattgccaacatgatgaatattccggtcgttaacctgcataaggttcaagatgttggtttggaaaaagcagtggcagaaaaacaggaatatttgaagtggcaccttgattattatggtgagtacagcggcaagcgtaactatgggcaagaggccatgctgacaatcggtaacggctactttggcctgcggggtgcgtatgtcgaagcgaacgccaaccaggataattaccctgggatgtacgttgctggtgtctacaatcaactcacaaccaaaattaacggtcgggatgttgtcaacgaagatctagtaaacctccccaatgctcaatacatcagttttggggtggatcatcaacaaccgtttgaaattaaaaaagaagatattcaagatatttatcgaagcctaaatttgcgaaccggtgttttaacaaccaccttgcatattcaattatcaactggccacattttgcaagttcgggctaccaaagttgccaatatgacaaattggcatcgttattccatcaagtatgaattaaaaccaatcaacttttctgggagcattcaactctattcaaaaattgacgggactgttattaatggcaatgttgagcgctatcagggtttcgatcaacaccatatcgacgtcattggcatggttgcccgcgataaccagatttcgttaaccggtcaaaccaagacgtcccacgttaactttgtgattaattctaagctttctagcaaagatatcgataccaccaagttaatttcagctgaaactgaagataaatcaatccagcaaaaattggatatccaagtagaacctgagaaatcgtatgtatttgaaaaatgtgtcacagtatttaccagccaaactcaggatgccaacttggaacaacccgcccaaaaggaactgaacgcttcttcgttcaatgacaccctcgccgacagtcaaaagttctggagcaacgtttggcagaattcagatatccaaattgataatgatatgaccagccaaaaactgacgcgggttaacatctaccatatgcttgtgacaagtgccgccttggcttctggtcaattagattcctcagtcggcgctcgtggcttacacggtgaagcttatcgaggccacatcttctgggatgtcacctttgatctaccgttttatgctattcattacccagcaatcgctaaacagtgcttgttatatcgctataatcgaatcggtgaagcgcgcaaatacgccgcctcggaagacaagcaaggggcaatgtatccttggcagtcagggatgtatggggatgaacaatctcaatttgttcacttgaacccggttagtggtgaatgggatccggataacagtcgcttgcaacgtcacgtttcactgtcagttgcctacgatgtcattaattatgttcatctaacaggtgataccgaattcatgaggaactacggattagaaatgttattgtcaatttgcaagttctgggtcagcatggcaagctacgataaaaaagatgatcgttacgatattcatcacgtcatgggaccagatgaattccacgaagaatatccaaactctgatgatcacggactcactaataatgcttataccaatatcatggtttcttggttatttgataaagtcgcagagctgatgagtcatgaagatcctaagataatcaaatctgccaatgaaaaagcccaaacagacaatagtttacttgatcaaatgagtgatattgcccacaaacttcgtctcgatatcaacgaagaaggcatcattggtcaattttccggttacttcaatctttccaagctcaactttgattcttaccggaagaaatacggtgatatatcgcgaattgatcgactgttaaagggtgaaggtaattcacctgattcctatcaagttgccaaacaagccgacactttgatggcttattacgaattaccatttgatgaagttcaaaacgtcattacccggcttggttacaagttgcccgccaactactttaccaccaatttaagattttaccttgatcgaacgactcacggatccaccctttcacgaattgtttattcagttctggatgaaatggatggcaatatggatcgatcctggcaattgttctcaaccgccttgttctccgattactatgatatccaaggtgggaccactgctgaaggtattcaccttggcgtcatgggtgctacgcttgaaattgaaaccaagtgttacggcggggttcggtttgacaccgacgaggtttccatcaacccgcaccttccaaccacttggagtaagctatcatttaagcaaacgtatcaaggcatcacgtacaattttgaaatcggtcatcataaaatcaatgtgactgccgattcgagcagtcacatcaaggttggtgacaagggttattcattatccaagaacaagccaactgttattacttacaaataagattaggagtgaaatacaatggcaaagttttcagatattaaaggttttgtcttcgatctcgacggtgtaattacggatacttcggttttccacagccaagcttggcatcaagttgctgacaaggtgggtgccccatggtccaaagaacttgaagacggattaaagggaatcagccggatggattctcttgaaatgattttaaaagcaggtaatctacaagaccactatactgacgatcagaaggttgatcttgcaacggaaaaaaatacaaactacttgaagttggttgacaaaatgactccagctaatattcttccggggattaaagaattcctggatgaaattaaagatggtggttatctgttatcattagcttctgcatcaaaaaatgctcctactgttttgaagaagctacaattgactgattattttccaaagattgtggatccaaaaactttgagcaaaggcaaaccagatccagaaatttacctcaaaggtgccgaactgatcaatttgaaaccagaacaatgcattggagtcgaagatgctgccgctggagttgaatcaattaacgccgctggggaaacctccattggaattggtgacaagacaattttgaaggatgcagatgtgaactttactgataccagtgaaatgaccttggctaacattaaaaaacagatggactaattcaatccatttggaaaactgggacaattgatgctttaatcccatcatttaagggcttcaccctgaaatccaaaacgaggatttcagggtgaagcccttaaatgattgcgtatcgtaagttatttgattaacccgtaatgcttcagcccattcacaattccgccattcacatttgaagtagtgacgaatgatgctttggctttcacatctgggtgaccattacccattgcgactgggtaatccacttcagcaaacatttgcaaatcattcagctgatctccgaaagcataggacggaatgtcccctaattgcgctttcttcaagagtgcttgaatgccggtttgcttcgatatcccccacttcatcgtatctaaacagcgaggattatttctaaccaatgacaattcacccttgaattcatcctgatacagtttatctttatcataattaaaaacgttcaagaaattgacttcatgagtcttgtaaaagtccggctcaacgtgcggcgtcaatcttaacagccgatagttaactttagttaagtcattttcagctgttaaggcaaattcttcattgttatagaatgaaatcacatcgccctgctttttggcaaatgctaaaatctcttcaatcacctcatcactaatttgctcagcctttagctttttcccttgatattgaacgtaactaccgttcgcactgactaatgaattgataccggtagcgtcaatcacatattgaatttcaaaaatatttcgaccagttgaaattacagggagaatattgttctctcgtaactgattaattgctgcaatgttgtcatcagaaacattcttttgattatcaaatagtgtgccatctagatcaaaaaaaacaaccgctttatacattgaattccctccatttaactcgatatctacattgtactacttaatctactgctccctgaaaatttcgcctaacttttgacaaaaatatgtatattcttgctggttaaacaactagaatgagaacttaataaccaccaaatgaaagcgttctaatttaaggccgttttgttttgacaatgcttgataagtggcttacatttaattgtgaaggatagcacaacctatccgcagacatttgtgtcaattcaaatggaagaggtggccagaatggcaacgaatcaattagtattaaaaaccgcagacatttgcgatatccgggatattgaggaagcacgggcaaccattaaaccgtatattcgcgaaacacctttaattcaatcaatgttcttgagtcgtaatgtggcgcacggtcatgtctatttgaaattggaaaatatgcagctgacgggatcgtttaaattccgtggtgcgaacaataaaattaaccatttaacgccagagcaacgggctaaaggcatcattacagcttcagccggcaatcatgcgcaaggggttgcattgaccgcgaagttattagggattgatgcgaccgttgtgatgccagaagaagcaccgcttgctaagcaacaagcgaccgccggttatggggcgaacgttgttttacatggtacgacttttaatgattcgcggttgtacatggagcagttagcagccgaaaagggcttaacaattgtccacccctacgacgatcgcgaagtcatggccggccaagggacaatcggccttgagattttggatgcgatttggaatgttgatacggtgattgtaccggttggcggtggtggcttaatctccggcattgcgacggctttgaaatcctttaacccctcaattcacatcattggggttcaatcggaaaacgtgcacgggatgacggcttcatttgaagcaggcacaatcaccagccatcatgcggacttcacgctagccgatgggacagacgttgcgattccaggtgaactgactttcccagtggttcaaaatctagtcgatgaaatgattttagtttccgaaaaagaaatcgcaactgcgatgaaggatctcatgcaacggactaagattgtcacagaaggcgctggtgcattaccaacggcagcactgctgagtggtaaaattgatcctcaatggttaacagataaaaatattgtggctttagtttcaggcgggaatgttgatttaacccgcgtttcgggtattattgaccaactcttccacccagctgatacaagcaaaggggttgttggataattaaaaagccggcatccgtctaaaaacggatgccggcttatttttgtgctgcaagaaaggttggaccatgatcgtcaattagggcgtgaaattcttggcagtctttaacagtcatttggggtaagagctgtggttcaataacctgttgtacctttaaatagtggaggtcttttaaagaacagtgctctaggtgagcaattaagcggcgggcatataaatcagcgataaagactgggcggtcgaagacatataataaaatgacatcggctgtttccgggccaatgcctttgatggcaagtaactggcgccgtaggtcagtggtggttgtcatctgattgagcgtgtctaagtcaaaatcaactgtcgctaaaaatcgaaatggccctttaattgtcctgcttttagcgttattgaagccgctgggtttaatagccaacataagggcttcatccgaaagagaaagcagattgtttggctcgaagtgcgtacttgatcgtagattggcgagcgagcggtcaacattttgccagtttgtattttgaactagaaccgcgccaaccattgtttcccaatgggaatcagaaggccaccagtgttgcggcccatattgccgatacattgtttgaaagagttggtagtaatcaattttaccgttcatgaaaaatgtttccttaacataaaaagacgctacttcacctttggcagtcacttattgtcaattcgcttggtgcgcagttgtagcagtttggaagttgtggctaatgagatggtggtcaaaatgatgaaaaaagtggttgaaagtaagaaacgcggcatctgcgccccagaaaattttaaaataatcgtggtaagggtactaaaagtggtgaggatgtttaaaattatgagtgaaatttcgtagttgcccgattgtttcgaaatgacgtggccagcgtataataagccaacgccgaacaatatatatgagaaatagaaaataccgaagaaaacgatgaaaatagttaatgattctttggcgtagacgagaatatccgtactggtaaagatgcgaatcaaagtatttagaatctgataggtgagataaagtgttgctagatagataaaagtggggaagttttgtttggtaaaggccatagcaatctccattgtttttttattgtaaagcttgtcactattctagcatggaatttaagaatggtcagttgaaagtcagccgagaatgcgtttttatttgtaattaatatcatctgcgttatacttgagttgtgtaaaatagaataaggagtgatcaatgtgaaaattatcgttgtcggttcatctcatggtggatttgaaactgttcaagaaagtttactcgattatccggatgcaaccatccaatggtacgaacaaggcgatttcctatcgttcttatcctgcgggatgcaactctatttagaagggaccgtcaaaaacgttgatgatgtcagttatgcgacaccagaaggcatgcgggcaaaaggggttgaagtcaacctacaacaagcaatcaccgcgattaacgccgatcaacatacggtccaagtgaaggatttaaagaataatacaacgcgtgaagaaagttacgataagttagtcttgagtgtcggcgctgtgccatttgaattaccagtgccaggccgtgatttagagaatgtctacgcaatgcgtggccgtgattgggcgattaaattaaaggcgaagacagttgatccaaccgttaaaaatgttgtggtgatcggttctggttatattggcattgaagcggctgaagcatttgctaaagctggcaaacatgttacagttgttgatgtcttgccacgtctattaagtctctatctcgatcaagaatttacagatcaattaacggctgaaatgcaagcgcacaatatctatcctgcagttggtcaaggcgtcaaagaatatgtcggcgttgacggtaagctaactaaagttgtgaccgatcaagctgaatacgatgctgacttagtcatcgaagctgctgggattcggcctaacacaggctggttaaaagatacattacaactcgaccgcagcggccggattgaaatcaatgaattcttacaaacaagccaacccgatatttttgcagtcggggatgcaacggttgtaaaatacgcaccaactggcaaagaaatgccaattgctttagcaacgaatgcgcgtcgccaaggtcgctatgctgctaagaacttagtcaccgccaaccaaccggtacccgctgtttcaggttcatcagcattgagcgtcttcgattatcactttgcttcaactgggattaaagaaggaacggctgataaaatgggtgtgaagacccaatctgttttggtttctgaaacatatcgcccacacttcgtccctgaagcagaaaatccagtggtcgatttcaaattaacctttgatccagaaacacggcgtgtactcggtgcgcaaatcatgtctaaagctgacgtgacggcaaacatcaacgccatttcacttgccattcaaggtaagatgacaatcgatgatttagcatacgctgacttcttcttccaaccaggttttgaccgtccttggaacatcatgaacgtcgccgcccaaaaagcacaacgacttttagacaaataaagtgcaagcagctgtcaattgaagattgatggctgctttttgtgctgacatggttcgccaaataggcttgatgaagacggtgattgtcattggattcgtgtattcagctggtgtattgctcttaacggggcttacgcttggctattcaagtgtaagacgttggcttagaaagaatcgctaataaaaaaggattgggaatcgataaaaatatcgattcccaatccttttttactatattacccaataccgatcacataatatgcgagtttatcggcgtagtgtcgttggttattttgttgtttagcttgcttaaccgcggtgagattgtcggtgaccacgccgtctgtaccgaaatacatcatgcgttggacggcttgttgatcattgggtgtccagacaaagacggccttattttcctgatgtgcagcttgaatgaagtgactgttgacagttgtcatttcaacggcataaaaatcagcgttcgaaattggtgggccgataaaattaaaggggagaatgtagcccgtttgaatcttcggtgctgcctttttaacggcctcgacgatgtgccagtttaaggattgcactatgtgaccgtgagcttcgatattggcctgatacttattcaggaaatgttgcaccaagccgggattatcggtggtgggtgtcttaatttcaatcagtagtttttgatgaagctgattggcgcgtgcaagatagtcatcaaatgaagcaattggtgcggattgccgatgttcatggacggtcattttagtcagttgcgccagtgttttagactgcggggtccctgagtgcccagtgagtggggcaagttggaagtcgtgaaagacgacgaattggtgatctttagtcaattgcacatccatttcaacataatcgggctttaatcgggtagtttttcgcagcgcactaatcgaattttggacgccgtctttttgcgaaacgccacggtgggaaatgcttagcggctgctgaatggttactgaatggagatagtcccaattataagtcccaacgccgattaaaacgcaatttgctacgaataataaccaacgaccactgagctgcacgcttaattttaaggttgcatagttgaacgtcggttgcacaaattgtgggtcggccaacaaataatcaatgacgatgaaaaagacggcgactgttgaaagcaccaagttgatgagcatagcagcttgcaacaaggtcatgatgaccacggcacttggcagtcccactgatgtgtgggtttcaatcaacgcttgtagttggatgagtaggaaaaaagtgagtcccgtaaagccaatcagtgcggcaccgattaagagtagacgccccagtaatgagccaattttttgatgtgtaaactgccaactactggtcaacgcttttttgaaagtcatctgctgaagaatgatgtttggtagggtgaagatcagccgtaagccgagatataataagcccaaatagacaagaatgaaaagtcccgcgacaattcgccgattcatgagaatataatccagaatgaatgccggtattttaaacttagtcaataaatcagaatgatagccaagcccgcccagcggtaaaattaaaagacaataatatagaaagaaaaagaacgtgccaattcgaaggtgcctgagttgcgcaaaagtcatcttcagcaatgcctgcaaagctagcggccgtttaatctgaataaagtacacacttaatagaagaaacgtgaattcgaagaaagccagcaataaaattagtagcgcaattcctacgagtgctaacagcgcaatcggatgctgatgaataagcgctggcaagttgctcaacgcgagaaactggatctgattatgtaccagaatgaagtagctggctttactcaaaagcggtagacaaattaaaagcaaaaagccatgcatcaataacacactacgaaaataggcctgggactgctttaaaaaagtgaatgtacttgtaaatagggttttaaaatactgcattgaatgggtgctcctcaattggactcgtaatgagataattgtacaacaaatatagaagcgtgtaataccgattaatctttgtatttaatgaagagtttgttatagttattaagttaatagtatgaatgaaattgctaaagctatcttgtggaaataatgaccaaaaaatatttaagcgtgcgaactcggaccaaacatacatatgctttttataaagagcgacggaacaatccgcaatggcgcgacgattttattcaggttagatcgcaaagaagaaaagcattaccgtgtcccagaaccgcctgctagaataatacctttcattggataaaatcccccttcaatatttgtaacttaccaagttaacatctgaaaaacataaaacgcattacgcccagagccattttttaataagccatatgttctcattttacgataacgttcaactttagaatagtttttaacattcgtgtaaaaatgaaccatttcaactttgtcgtctgtcaaattaggataatcagcaacaaactcagtagcttgtgccatcgcaagttgaatcatctgcttcgtttgtgcaaataggtgtttacggctcatcaattcacttaggctgttcttagcaccaacttcattatcaccatgttgtcgatatagaattgttgcttgtggtacgtatccaatcgttccaaatgcacttgcaactagtgcaaaccaccaatcatgcattctaatcttagtgaaatctagtcccacacaacgatcctttaaattctgattaatcatcattgtacaaccagtaatgctattttgaaccaacaatcgcccaaaactaggttgtggatccaaattttgcgttttaatcattgattcgctcgtcgccttcaagtcttgatcaacaattcttaaatcagtatgaactaaaataggttgttgtttattttcagcttcaagtgtgagcattttgtttaaggtaacctggaccttatcagataaccaaacatcatcctgatcacagaacatataataatctgcttctacagattcaagtaatttcaaaaatgagccgattacccgtaagttttgtggcttattttcattaatccattgaatacggtcatctgcttggtaacgacctaatatatcaagtgttttgtcagttgaaccatcatctctaatatagagtgtccactgttggttggattgcttaataatcgattcaatttgttcttctaaaaaacgctccccattatacgttgatagtaagattgctatctttttagtcaccatcaattcctccaagacgatttattttagatacaagctgccaataaaaggaattgttgcatctttagtgaatttaattaggtttaataattcgtcctttgttgtcactttagtctgcacaactgctaacattgcatcaacgctactcaatgctaatttttcagtaggtttttgtacatcgccaatgacaaaaattaattgatcttcattttctggaatcatcatagcatcttttaagaatgcttcttttgcatcaactaacttaacattaaattgccattcctttaactgattggcaatatcggtgattagtgcaatttgttgtgtatcgttagcattaaccccgacaacttgatgtgtatcctttatacgcgttattagttctgtagcagcgttttccaagtcactggcatctgcaattacatttgtcgctgtccgactttcaatgaaattgctgctcataattttttgattaaaatatttacgaacaaagattaaaccagctgataagaataagcccaagacactcgcaaaaaagactgctttcttagcactcattcgttgggttgtagtacttgttgattgatcgaaatcaacaactttaacagaccccgtttccatatcttttttatattgttctaacgctactttgtcatatgcttgactaaccagtttaacgttttttttagtgtcccctgatactttcagcttcaacagagtcgtttgtggaattacttcaaaactaaccattgaatcaattttatccaccgagaatttaagctttttatttgctaattcttgcttgaccgctttttgagtcttattattcttcaagttttctaaatatgtattcagaaaagctggatcattactactaaacgtcattactttatcatttgcatcatattgtgttacctgtagcttagaaatcgcattatatgacgttgttgttgttcctttaccccttaaaaatagtccaagtactgcaaagcaaattgtagtcgcaatgatgattaaaaggttcttgatagtcatcatttcggttaaagcttcatctacactgtatttcttattcatattaatcaaacctcaccacttttttgtatgcataaacaccaataagcataccacaaacagccatacttagggtatttaaatccgagttaataaaaaattaacaatcattttataaaattttttcatactaaaaaacgcatcatccatcaaatcattcttgatcaactctgcgtttagtttattatttaatggttatttgtgttggcgagctgtaatcaattgtatttccattgcctcggaaatcatctgtgtaacgaacaatcgtatagacagtcttaccacgcattttatcagtaattggcatacttacgttaaatccacctaaattaccattagaaaaatctggataagctttagcaacatcatttcttgtaaaattatcaattctcgttcgttcaatctcagtgtgtgtcttagcatccataataaacataaaacgatatggcgttgattgtatatatcgcccaatatgccatccaaatgcgtagaccgagttcccttgttgtcttaaaacatctaatgaaccaagtgtcccttgcgtaggtatattcaatacattatcaaagttataatcgactgatccataattacctctagcatctgaagagtaacgaaccattaatttaacttgtttaccaaataatgaagccggcatatctgcaaaaataccaaacccactgttacttgatccagaaattgttggataagcattaccaacgtctgggcgattccatcttgaaattggccaccgtgcaatttcattattgttttttgcatctaaggcaaagacgtaactatacggtttcccggctgaatcagaatcaattgaccacccaaaagcgttgaattgaccattgagtgtgtcaaatctatctaaagaaccatattttccttgattaaacgattctttatcccaatcatagagatgatattgttcaataattcgaattagagattctgcatacgttggagctgttgcatacccatcggcttgtagcaattgtgcaacagttttatagtctgtcacgcccaataaattgctatatcttgaattaacattcaaaaaagttccgtgatctgcaatactacttgcaacatctggatactttctgaaaggtgcatcaatatagatatattgcccattaatgtattcttgtgttttcataatgacatactgaccattataatcgcccttaattccaaaaagattatgcgctgaagtcgctaatgtggattgtccccatgcactttctaaaatcgcttgtgcagcggaaatggaaggtagcactcggtgcgttgtccacgtatttatggttccttgtttaatttgatttaagaaatcatctacataatttccgcgcaccaataaattactccgtaacttactccgtaacattggtgaaaaagattgagttgcttgtcttgtagtgccatagtagccgggtcctaatgtactatcggcgtatacggtagcttcatctgatttagtttcttctttagctgtcttagcttctttactactgctactgctactgctactgctactgctactgctactgctactgctactgctactgctactgctactgctactgctactgctactgctactgctacttagcatatcactagaatcagccagtgcaactgactggctattagaactagtgtcggcactcgtggcagcctgtacctgattaactgaatagctagctagaataaaacctccgagtaaaacaattggtgcgatttttcgaaagagcattgttaaattctcccttaattaaatttagactttatttattaataatacacttaatcggcttaaaaaagattacattactatgacttttttattagctgtttttagtacataacaacaccaagcagtacaccgcctattgctaccgagtatagcaccttcaatatctttgaattctctacatttttaagaagatctaaagcgaaaattgcaatgtagaaatcaataaaaaagaaaattctggcacctctgtaaattttaacagttgaaaaaattgctggtgaattaccaacgatagctaacccagccacaatagataacagaaagaaaagtaccattaatttattatgttttgaccaaacaatgcctgctgacaacactaataactcaaatgaccaaagaatataaggcaaaatagcaatccaaaagtcgtgattagcaagcgccaccgttactggctggtataagtaaataaagattctattgaaatcaatactcaatgagctcaacattgttatcggtagcaaccaaagctgaatagtgaagaataatttttgctcttttttctgatttaaaacaacatacatcaacccagttaaaagaaagggaacaaaataataaagttttgcaatatttctaatcgcccatacataccatatacggattttcaaattagttgagtatttattaaactctggtgtccaaaagcttacctcatgcacctgtctcgcaactactcccggtgattttaataaaaaaacaataatggcaaataagataatggtaattggaatagaaattaatttaatacaatgatttttaatcagattatatccttcgaaaagcaaaataaacccaagcaataacgctaaaatttgttcatttgataatccaacataaatagttgcaattatcattgacagttgataccaccatttttcattttgctcttgtccttgataacgcataaaatatggttttaaaataaataatgctgcaactgatggccataaataattcaatgaaccggttacccagtaagcactatcccagattaatgaaaaatctgctaaacataaacttgcaattgcaacccaaactgacttgaccgtaatccgcttattaaaaagcgttgctaaaagatacccccccaagaatataaatagactatttataacttgccagattataattggtacgttaaaaataaaatagtcaattccgtccggaataattcttgcagaatatgagtcataccgccattttaaaaatttaaagatatctggatatactgtatgcactcctttaaaccaattatcatcagtatctactcttatgccaaaaaaaagattaactatgaataaacttaccaaaaggattaaaaatcctaaataagtattttctttaaaccgtttcttgatactgtccattaaaacaacccctaaacatttaattcgttctctattctaaatacaaattacaacttttaaaagtataatacaaaatacaaattaatgctttaattatcaaaaaatactagcaattattcaatacttacttgccagcttactttgtataaattcttctgtagatattggaaagccttaccgatatatgtaatcatctcgataaggctttctctgagttaaattatttaattgtaacagaatttctagtaaagaaataatcactcgtattcccattaccattaggtgcatctgaataacgacttacaattctgacgatttttcccttcatattactactaattgggatatttaagttaaaaccactttcttgagcattgaatacatccggataagcgtttaaaacatccagtcttgtttgacgattaaaactaaatcgtgctaattcacgattattaagggcatctaagaccaagatataactatagggtttgccaattgcatagtctgtcgcatgccatccatgtacgtataaattatctttagtcaaaagaattcagtttcttagaatcttttattttggctgttgaaatattattatttatgatactttcgcgatttctgggttgttccttctcaacatgcgttatactattagtcagttactattttgatcaattgaagtaagaggaattttaaatgcaaaaaaaactagttatcacggaaaaaccaagtgttgccaaagagcttgctaaagttctaggaacaactcagaaaactaaaacctactttgagggcgatcaatacgtcatcacttgggcgtttgggcatttgttatcgctgcaattaccagaggatatcaaaaaagaatggcaacaatggcgtttggaagacttaccgattattcccaagcatatcggtttaaagccattgcctaaaacgggtggacaattaaaagctatcagtcacctcgccaaccgcaaagatatttcaggtgcggtgattgcaactgattcggggcgtgaaggggaagccgttgcgcgctatattttggaatggattaaattcgataagccggttgaacggctctggatttcatcgcaaacgactaaggccattaaagcagggtttgcaaacttaaaaccagccaagcaattcgataatttgtacgcatcagcgttagcacgcggcaaagcggattggttgattggcttgaacgtgacacgggcattgacgaccaagtatgaagataatttatccgctggtcgggtgcagacaccaacgttagcctttgtgaacgaaacggcacaacaaatcaatcgtttcaaaccgcaaacctattacacaattcacttgacggtcgatcaacagcaagccgccttacaattagcaaacccgcaaagtattaagacgcgccaagcagcagacgacttagttgcacaattgcaacaagccaaaggccaagtggtcagcgtcaaaacaacgcagaaatcgcaatcagcacctttaccatatgatttaacggaactccaacaagtggccaatgcaaagtatggcttatccgcgaaaaagacgttatccttgattcaatcattgtatgaaatccataaagttgtcagttatccacggacggattcgaaatatctctcaacagatatcgaagggactttgaaggaacggttgtcggcattagtcaaatttgatccacgtgctaagcaatacttggggcaaggcagtcaggtcaaacaaaaagccgtctttaatgatggcaaagtaacggatcactacgctttaattccaactgaagaacccgttcgtgccgaaaaattatcgacggatgaactgcgcatgtatcgcttgattgtggaacgcttcttagggttgtttgctgatccatacgtgacagctgttacgaaagccaccgttaaatttggtgatcaaacctttacgtttaagcaaacaaaagtcgtgcaacaaggttggcatgctgccgataaagaggggcaaccaaccgcgacggtcgactggcgagaagggatggtagttcgcgctaattttgcggttaaagaacaattgacgacgccccctaagccattgactgaagggatgttgctcgggaagatggaacactacggtttggggacgccagccactcgtgctgaaatcatcgaaaaattagtccgtagtgaactcctagaacgacaaggtcatgctttagcagtgacgccaaaaggtcagcaacttttaaaattggttaatcagaccttggtttcaccagaactgacaggaaaatgggaacagtcgcttgaagcgattgccaaaggcgaagaaaatccgaaggcgttcatcactgaaatcgagggtgccactaagaccttggtcggtgagattaaaaagagtgagacggaataccgcgattttgcagtgacgaataaaaaatgtccggaatgtgatcatccgttaaaagaacgcaatatgcgtgacggtaaaatttatatctgcacaaactgtcactatcggcgtcggaaagatccgaaggtttccaaccaccgctgcccacaatgtcacaagaaaatggtgattattgaagggcaaggtggcgcatacttccggtgtcttaatgatgggacgaccgaaaagatgctcgacaagaaagatcgtaagaagaaaatctctaaacatgaagaacgccgcttgattcaaaaagtgaaccaagaagatgaaccagcggaaagtccattagccgctgcattgcgtaaggcaatggaaaaataagctagcaaaagaggtagcaactagaattattctggttgctacctcttttttttgtttagaaaaattgtttgacttgttgtttggtgcggtcaacaatattctgaccgtctttgacttgcatgctagcatctaagtgagaacgaccagtcatgtaatcgaatgcgacgccaggttcaacattccagacgtaatcgttgaaattcagcgtgccatctgtggaaatggcctgaacccagtaaccgcgcggcatcagttcattaccccgaaaaacggtggtgactttgtaaatcacttttttgtttgcttcgagcgcagtgcggactttttcttcaaaaatctgcatcgttttctgattactgtacgcgctttgggtggcgaggttaagtggattatctaaactgcctggttgaccagcttgaaagttaccattctgatcaaaattaaaagtgagtgtataagcaatcaagtggccacgattttgcggtgtaattcggcggccattgacaatcagaggttgattatgccaacccgttggattccaaatttggcgcgtccggccttctgatttgcccagattccgctttgataagtaagctgtgacgctagttgttcggttaagctggtcgagttgcccatagacgattttttcaccttgccaatccgttgctgttaattggctttgatcgttattaattggtagataggccgcagatccgcttttaaaatcttgatcagcgatggcttgataatcaggactgactgggggtgtttgtttagctggttgctcagtagcaactgtagcagggaacacattttgtaagacattgttgcgaccaccgagataaccgactgccaagatagcaatggttaagatggttcgtctaatttttttcgttttcaaaagagatactcctattaatgaaaattgatttgagacaagataaaaacccacgagatgaattgatcatcggtgggctgaaggtattattttgaactattgcgtagtgtcagcgtcgtgccaatcgtaatgacttgggggataatttcgctagcggcgagttgtttaaccaataactcggcagctgattggcccatttgttcagtgtaaactttaacggaacttaaagtagggaacgtgtattggcaaattgaggtatcgttgaaactaatcaggctgagttgttcagggactttgatgcctgattcatgtaaggcgcgtaaagcgccgactgccattgcatcattggcgatgaagagggcttctggtaaatcggaactttggtcttgtaataattgtatcatgagttggtaacctgattcgggtgtaaagtcaccggttaaaatccaatcggggtgatagtttttttgagctttgagtaacgtcttaaaatgaataaaacggggatccggtcccaatttagtattatcagcagtgctctcttgaccagttaacataccaattttagttaagccagcggttgtaaaatggttgattacggatttaattggtgttttgaagtcggtcatcacacagctgacttcacaatcgagcgtgttcatgtcgacgaagacgaggttgtggttgagtttttttaggcgcttaatctgcgcagggctgtacttaccaattaccacagcacccgtagcatcatggagcgtatcaaatggatcgttttgaaagaagcgtgttacgtcataaccaagttctttgagtttcttttcaacgccaagtcggatggagaggtagtatagatcttccaattcttctttagcggtataccattcaacaatcgcaatgcgtccgcgttgctggttcattttgcgcgtgtttttacgatagtttaaactttcggcggcttcgaaaatccgttgccgggtctcatcgccaaccgaaagtgtttgatcataatttaggacccgcgaaacggttgcattcgaaacgttagcgagttgagcaatatctttgatcgttgccaaggtgcacctctcaattcaatgtttactattacttagtttagcataaccaatgaaaagaaagcgatagttaacaaaaaagattgattttttagtaaatgtttagtaaaatgaaagcgattaataaaggaggaatttactatgaacatgacagaattaaataccgcattcgaaaacgcattccacaaagcaccggaagcgagctacttcgcaccaggtcggattaacttgattggtgaacatactgattacaacggcgggcatgttttcccaaccgcgattacattgggcacatatgcagtcgttgctaaacgtgatgaccaaacaatcaatttattatctgggaactttgaagatgcgggtgtcatttcatttgacctcagcgacttatcttatcaaaaggcccacaactgggcgaactatccaaaagggatgattgtttaccttcaagaacaaggttacacaatcgacagtggtttggacatttatttaaaaggcaatattccaaacggcgctggcttatcatcatccgcatcaattgaattattaatgggtgtgattctagaagaccaattcaatttagaaattgaccgtgtcgaccttgttaaaaccggtgtcatggttgaaaataaatttatcggcgttaactcaggcatcatggatcaatttgccgttggaatgggcaaagccaaccatgccatcttactagacacgaacacattggattacgatttagtcccaattgatttgcaagacaacgtgattattatcatgaacactaataaacgccgtgaattggccgattcaaaatataatgaacgtcgcagtgaatgtgaaaaggccttagccattttacaaacgaagaatgatattcaatcattgggcgatttagataacgaaacctttgatttacaaacatacatgctacaagatgaaaacttgttgaaacgtgcacgccatgcggtttctgaaaaccaacggacaatgaaggcccgcgaagccctgaagaacaacgaccttgaacgtttcggcaaattagttaatgcgtcacacgtgtcattgcaatttgattatgaagtgactgggatcgaattagacacactcgttcaaaccgcttggcaacaaccaggggtcttaggcgctcggatgactggtgcgggctttgggggttgtgcgattgcaattgttgctaaagaccaagtcgacaactttgaaacgaatgttgctaaagtttatacagacaagattgggtatgcgccaagtttctacgtggcagaaattgccgatggcgctaaaaaattaggttaatcagtcaactgaagaggagaatgataagtagccctaatattttcttcaacgtcagctagttcggtttttaggtcgttaaactgatcattgtattttttgatttcagcgacattctcaaacggtaaggttttgtgatttaaaatgccttgttcataaaagggcagcaccttttttaaatcctgatctagatcctcatgaaagctttgcaaatcatggcgcgtgagcacttctttagcggatactttatagcgtgattttttatcatcaaaaacaacggggacaaaggcatagtgcaagtgaggggttgtctcgtcataatgcacgacagcggccacggcattttcttgaccataacggtcattgagaaaattgctggttgcttcaaaaaaggcgctctgttgatcgtggggcgcttctgagagttcttcaggtaaagtgacaatccaagtcgctaacgccttcacatcgtctcttttcatgcaataaacgtcatttaaacgctcattgaagcgtgaaagcatatcagaaccatctgtcatcagatcttgattcagataagttttcgacacatcaatttctttgttggtgtgatggtcagttttacgttcaaaatgaacggctaagccgggaactgaaccactgtgttgcactttaaatgaggtgatctttttgaatcttttaagaaattatagctgctaatgcagcaccagtccgagagtttttatcgtttaggctatcttttggatgaccttcaaaacaaacttgaccgccgaatttaccagcatcgggtcccatatcgactaaccaatcggctcgtgaaattaatttcagattatgttcaatcagaattaatgtattgcccttatcaaccaatccttcaaataaatcgatcaattgttgagtatcctgtaagtgcaatccggttgttggttcatctaagaaatagattcggccggtatgattcaattccattgctaacttaacacgttgcacttcaccaccagataaagtggtcatcgactggctaagattcaaataaccaagtccaacttggtggagtagactaacctttttgtagatatctggcacatctttgaaaaactctaaagtgtcgttgatagaaagatttagaacctcagaaatatctttgccatgataagtgtattgtagtgcttcttggctataacgtttcccatgacacaactcacattcttgaacgattggatccatgaatgccatctcggtgatcatcacacctttacctttgcaacggggacaagcacctttaccgttataactaaatagttgtgttgaaacgccattgttggctttactgaaaagctttcgtagaggatttaaaatgttcaagtaagttgcaggtgtagaacgaatattcaaacctacagaatcctgactcaaatcaatatagtcttgatcagaaacttgttgtttgaaagcttggactaaagtactttttccagaacctgctggtccagatatcacggtcattacaccttgagggattctggtagatacgtcttttaaattatgagaagttacatgattaacatttagccaagattgaggttcacgaggctttgggaaagtgattttttctcgtaacattttacccgtaatcgtatctgaccgtaatagttcgtcgtaggtaccagtgaaagttacttgaccaccatttttgccggcttgtggtcccatttccacgacataatctgctgtcgaaataatggcagggttgtgatcaactaggataatggtattgccatgttccttgagcttttttaaggattgggtaattaatttaatatcgtgaggatggagtcctacacttggttcatcgagtacgtaaactaaatcggatagggaactcgtcaaatatttggcaattttaattcgttgagcttctccaccagatagagtatcagttccacggccaagggaaagataacctaaaccgatgtcgaccaaagcttgaactttactatgtagttcacgcaccattgttttagccttggggtccgagatattatccaaaaattttaggacacttactaaatccatatcgctgacttctgcaatatttttgccagcaattttaccagttagagcctttttgttcagacgtgttccatgacatactgggcaaggttttcgagtgacaatctttgataaggcagcttcatgatgacgacctgaggcactatgaataacagagcgaagcatacgtggaactagtccttcatataatgccgtacggccccaatttgccggtggattttttaatttttgttgcggagcgtgcatgaataaatcatattcttcatcggtgtagtctttaatttttttgtctaaatcaaataatccactgttgccatattccttccaacgccaagttcccggttgaaaaccggcaaaagtcattgcaccttcattgagtgatttattaggatcaattaattgacgttcatctatgtcgtcaacaaagcctaatccctgacattttggacacattccctgaggtaggttaaaggaaaaccattcagaatacccaacccaaggctgtccaattcgagaaaacatcaaacgtaagacggaatagatgccggtgtaggttgccagagtagatcgagaattacgaccaatagacttctgttcaaccacaattgccactggtaagttgtcgattcggttcacttcaggttgaccgtatttaggcaaatattgttgggtgaaactaggaaaagtttcattcaattcacgtcgggaaacagcggctaatgtatcaaaaactaaagaggatttaccagacccagaaagaccagcaaatacagtcgttttatgcttaggaatatctaaactgacatcctttaagttattttcttgagctccatggatagagatagtcccatctgcaaataaatcagtcataaaaacctccaacagtaaatttataattccattatatatagaaatctcgtttaacaaaaataatcgggtctagaatttttggtgttggaaagtatttccattccaaaagtactaggccctaatttaaaaagccattgataatggatcaaaagcgaccactagggtataccctagtggccgtttttatttctgtgctatactaggaattacaagtgttcattagaactgtccaaaaggagaattggaaatggctaaaatcggttatgcgcgtgtgagttccaaggagcaacatttagatcgacagttatcggctttaaaagacgttgataaattatttacggataaattaagtggggctaacactaatcggccagaactgcaaaaaatgctggcctatattcgtgagggtgatattgtaatggtcactgaattagatcgcttaggcagaaacaaccatgatttgactaagatcatgaactccattcaaaataagggtgccaccctagatgtgttaaatttgccgtccatgacagggattgctgacccaaatttacgtcaactgatgaccaacttgattattgaactctataagtatcaggccgaaagtgaacgtaagcgaatcattgagcgccagcaacaagggattgccttagctaagcagcagggtaaatatcatgggcgcaaaccccaatacacccaagatgatccccgtttgcaacatgcttttaagctttatcgagctggcatgagtgacattgatgtgtcccgaaatacaggtattaaacggacgacctttattcgataccgtgtgaaatacggtattaaaagaaaatagggcgcccttttggttagcacatgttaactgaaagggtccctattttctttacttaaaaggtagattgatgaaatgctagctaacgctagtcctagtgataaattgtctaaacgcttgcaagcaatctttgcccaagcatctatttctcggcgtgatatgttgggtgcaatgattggcgccggtatgaatattgctacagcaaaaagtgaatcatttgcattgaatgaactcaaacagcagtatatcgatggctataataattcaagccctaataaactatcaacagttccagataaagtagccaaccaagctgagtattctcaacgaatttgggtgcatggcgacgtcatgacgacacgaatgaaagaaaccctgaacaagggtttgagtcgccgcatgaagaaatcagacatcaataaaatgacccgcagtattcctcaaagcggtgatcgaattgatgacaatttaacaacgcctatgaaccaaatgctatccagaattcatacgttaacaactaatgaagctatacgcaatagcaacggtggtaagaatagagcgtatgatgaacagaatgttcagtatgtgatgtggttaaccgaggaagatgatcgtgtttgtgatatttgtgaaccacttgatagacaaacatttgcctatggacaagcaccgattccagtcacggatactcatccaaggtgtcgttgccagctggtagcctgtgatgaagatgggaatctgctgtctggtgaacttgatagggtatttaaggaacaaaaaaagcccacttagtttaaaactaagtgggtcaggaatattattaattggctccgctcacaacaaagtcgaggggtgctaactaagttagcatctataatttagtataagaaccttaaatgaagcttaaaaactaattctttgatttaccgacaaagaaagaaactacagcaacaacaattactgctccaataattgaaggaataattgccattccggctaattgagggccccaagatccgagtatagcttctccaatagaggaaccaactaatccggcaacaatattagcaatccaccccattgattttcctttgctagtaattgctccagcaatagcaccaatgatggcaccaataattaaaacccataaccaatgcataaaacctcatcctctcttatttttcgaaggatgttttttagatttgttatagttttgaatttctttaaaaatggctaataaaagttgagatatagaaatgataattgatatttttgaccaaagtccaaatcttttcatatgaaatcctccattatctaaattgcatccttctaaatctaattataggcaattgaatatttgcatacaagttattcgattgtgccattctttttaaaataggaatttttgatttgcctttttctcaattacagacgttaaagaataattgatttagttgttgagcttacaaacaatttagcatacggacttaaaaaggagttttgatgatattatggtcttgggttttacggtactaatattttttagccagtattatggtaaaaagctcttttcacgtaatataagcaaactactcactttgatatttatacttaatattttagtttcattttcgagaactaaaatactaacattttttgttatggtaattatttttatggggtagattgcaagaaataacttgaacaaatttagtaacgcagatcacgcaaaaagatctcaatcggtgttcgccaatttaaacatttgagtggtcgggaattcaaataccagttaatttgaatcaattcatcatcggtaatctcatcaatcggttgacctttgggaatgaagcggcgtagtactcggttgcgattttcattactgcctcgttcatgtggcgaataagcgtgcgcaaagtacagcggaacaccgatctgttcttcaatcaaattgtagttggcgaattctttcccatggtcaacagtaagggtcttgagattatctcctaactggttagccaattctaaaatagccttggtcattgaagtactatctcgtccattaagccgtttaacgatggtaagccgactcttacgctcgacaaacgtagctactgcttgacctttacgttttccagataaaactgtatcagcttcgaagtgacctgaagtattacgatcagaaatttcagctggacgatcttcgatggaacgtccatgactaaaagtaccacgggtttctttagctcgtttgcgacgaataccatggtcaggtaaatcagtcacattaatatccagtagtccctgattaatccagttatagatggttttgtaggcaattctaactacatgagccacttgttcaattgaccatttttggatcttgattttttcttcaatcaatcgctttaggttagtcgttaagatggttttacgaccacgatgactaagtttaacttcatggtcagtttgagccttaactgcgtgatactcaccagctaagcgatgaacctcattaaagatagtggttttactaaagcctaaataatcggcaatatattgaagtgagtgcttttcatgatgaagtgtttcgatgacaacgcggtcttcaaatgataaaatagtggtgcccataaaggtccttctttctagtggaatgttgtggtgacaccattaaagacctttacgggtttttctgtccactaatatgttcaacttaaattttacaatctaccatatataaattagttatttttaaatattactatataaaaaataaaaatatcggagtgaaaaaaatgaattttcctattgattttgttgttgactgggtagatgattctgatcctaaatgggtatcgagtagggatcaataccgaaaagtatcacctgaaaaaaatggacggtttcgagactgggagcttttaccattttggtttagagcagttgaaaaaaatgcaccatgggtaaataaaatctatttagttacagataaccaaagaccggaatggttaaatttagataatcctaagttgcaattaatatctcatcaggactatataccagataaatatcttcctgtttttaacagtaattccattgaacttccaataaatagaattccgcatttatctgagcattttgttttttttaatgatgatttttttattaatagtccagttactcaaaatgatttcttttcaaccaaaggtttaccgaaagattctgcagtattgtctccacagattccaaaagacacatcgataactagtattaccactaataatgtaaaaatagtaaataattatttttcgagaaaagatatattacatcaatggaataaatttctcagatatgaatatggtcgtcagaatataaagaccttggcttgcttaatttggccaataattttaggatttcaagattcccacctacctatctcttttttgaaatctacatttaatagcgtttggaaattagaagagttgaggttaaatacgacgcttcagcataggtttagatcagataatgattataatatatttttatttaggtattttcaattattaaaaggggactttagtcctcgctctgttagttttggtaaatactataatttatctgataataatgaggaacctatcaatgatattaataaggggcttcataaagcaatagtactgaatgatcaagatgatatcgcagattttgaaaaagcgaagtcagaaattaaagagacttttatgaagaaataccctcataaatcaagctttgaaaaataattttaacattaaaaatggaggtatggcatgaagcagattgccgttctaatttcaacgtataatggtgaaaaatatatcgaagaccaaattaacagtatattaaatcagagatttgacagtgaaagatataacttaaaagttatcgtcagagatgatggttcaacggacaatactaatatggttcttcaaaaaattatgattgaacataaaaatgtgaaaaaacttccgtttgaaaaaaatctaggttttgctaaatcgtttatgactttgctgtcagaagttgagtctgattattattttttttctgatcaagatgatatttgggaaccaacaaaaatcgatgattttttaactgttatgatagataaagaaaaatcagaatctatttgcggggttttttcagatgcctggatcgctgatcagtttgcggtcagtacaggaattaaacttttagaagagagaaagcgcaacatactagatgggcagttaacatttatacagcaaatttttgaaacttatgtcgccggagcatcgttgtttatcaataataatgctagaaacaaggttttagagtttgattacgatagattttttagtcacgaagcacacgatcattttgttgcgataattattagtaaatatgggacattatatttcttggataaacctactttaagatatcgacaaactggaaataacgtctacggggcaagagactctaaaaaaaagtcagtattcaagcgtattattacattatatagtcgagtaaaaaacgtacagcttctaatgaaatcgggagcattgattattagtaacctacctgctgaacgagatttatcagaaacaatgttgaacatatcgagagggaaagcatcagttaatactcggattaattttttctggaagtatagaatgtacgtttctgtaagatatcctagaatattagcaacatgctataccttgtttacatttagaggtgtcaattaaatggcaagagaatttccataatgaaaaataatatattagaaaacttaatgatgtatatttattctgctcattctgctacggataaaccgttctccattttttgtaccttattaaacagcaataattttagcgtaagggttaatctagtataaatacttgcaagaaattttttagataacaaagaatgcattttttaggaacagtaaatgaattttttccgtaaagtattattggtgtttaaagataaggaggaattattattatatctagaagaaaggcatctgttagaaatgcttcgactgctcttttaacacagattattaatttattaggtaaatttgttgttcaaacaatttttattcataccttaggaactgaatatcttggagctaatggactgtttactaacttaataatgtttctttcctttgctgaattaggaattggtgcagcacttagctactcattttataaaccaattgctaatgcagatcataaggctataacggcaatcactaacttatatcgtaagatatataatactattggatggctaattttaatattaggcctactcttagcatactttgttccatttttagtaaaaaatagtggatccattaaacatttacgtatttattttattttgtttttactaagctcagtagtaagttattttttcacttataatcgatctctaatagttgcaaatcaagaaagttatatagactcgattaatcaattaatatttacaattatgaaatgtgttttgcagatagtgtttttaattactttaaagagctatatgctatttttagtagcgcaaattgcaactaatctattttctaattttgcaattacgagattagcacataaaaaatatccatttttattagatgataaaaaaataatgcctggtaagagtgttataactgagataaaaaagaatgttattgggactatttcttcaaaagtgggtgcggttgttgtaaatggaactgataatattttaatatcaaaatttgttggattatcagttgttggactatattctaactattcattagtagtagccggaataacatctcttttaggacaagttttaaattcagttgttgcgagttttgggaatttaggagtttctgaaaaggataatattgataaacaagtcaatttatttaatcaatttgttttttttaatggatttatttcaattgtagttggattattattgtatattctattccagccgtttatttctatgtggataggaacacaatataaattatccgagtttacacttattataattattattaattttgtttttgctcaattcagaccagctttatttcttgtaaatgcctatggtcttttttggggatacagatataaatcaattgttgaagcaactgtaaatttctttttgagcttttatttagtaaagtatatagggttaggtattaatggagtactaatagggactattgtgggaaatataattgtaaattcttggtgggatccgatgatactttttacaggtgcttttcatagaggtatatttaaattttatttacaatatatttattatattttcgtatttttaggtatgctgttatgtgagtttatgtttgtacactatattaaaattaatgtaaataatcttattggattaattctatatggtttatctagttcgattataatttgtattatattacttggacttctaggacttactccaggcggaagatctgcattaagtatgattttgtataagattaaaaaaattaagtaaggaaggttatttttatgaaaggtattattctagcaggcggttctgggacacgttattcaaaaaaacgttacgctatctgcggttcgtggcgaggaaaactacgatgcctataatcttagtccggatgcttgcgcgattttaatttcctattctggcgagaatcccaacttactagcacttaacactattttacgcacccgcaacatcccgacgattgcgattaccagtatcggtgaaaatcgactttcgcaagaatgcacttgcttttaccgattacaacccgtgaaaaactctactcgaaaatcggcaactttaccattaatacctccatcatcttcctattaaatgttttatacgcgctcgttttttcggaacactacgatgcacatctcaaacatctaaaacggattggtgaattagtcgaccatcgcaccatcagtaacgctgtcatgcaagaaaatgaacgcacaaaaaaagccccttcctgacggaaggggcttttttcacagtattccgaagaataaacaccttgtgctccacaacacagcgggcgaaaacacccttgcaatacggcaagtggttaaatgaataaccgtggtatcctgtatctttgggtctcctagctgccttcgcagaatagttgcctaccgagacttactcgactcatcgcataaacttattatagcatactttttagtgacgcgatacccatttcggcgtaatcgctcgttttcgtgttatatcggctaaaatttgcgctaacataaagccaacggcaatcgcaccagcaatcatgattactgaaacaccttgtgtcgaagcttcatttaagttgcctagcacgagattccgaatcgcacgatacgcagttccaccgggcactaagggtactaaccctggaatattaaagataatcaccggcatccgcttataacgggccataatattgccacaaatcccaacagctaacgcacccaacaaattagcaagcatccgcccgctaccaaagttaaagagcatccaatagacctgccaccctgccataccggcaaagccacaccataataatgcgcgtcttggtaaattaatacaaattccaaacgcaaccgttgaaatataactaaataacgcttgaataataaactgaacccaatatggcatctgatgaacctctctttacataaagaatctaaatacgagcgcaatccctgttccaattgcaaaggcactcaggatggcctccatcccacgtgccataccagataataaatgccctgctagcaaatctcgaatcgagttggtaatcgctacaccaggtaccaatggcattacagccccaatgataatattatcgatatcgactcctaagtgccacctagttaatagataggcgactatcccaatcactgtcgcacttaaaaattcaccgataaagcgaatcgttgtgacccgattgaccgccgcaaaggcggcatagcctaaagcaccggctaccgctgacggtatgatgtctaaccaatcatattcaccagaaaaaataatcatcaaaaacgctgaaatgactgctgcagctgtaatttgtaaccacaacggaaaatgagctgtatcctgatcaatttgttttaaccgtaacattaactgatccaacgtaatttccttagtcgcaaattgccgtgaagcagtattcacattttcaacttttccaaggttaatcgtccgcaccgcaacagcgcctagttgcacataaggttgattttcaattccgataaataaaccggtcggtgtcgtaaacacaacactcttttgaatgcctgcattataagcaatccggttcattgtatcttcaacccggtacatttcagaaccactttcaatcataatccgtcccgcaattaggcaggtttctaatattttatttttttgggcaattttcatggcaaaacctcattcgacaacttttttcattatctccatcataacttgtttaaactgaaatagaaaccatttacatattaaaaattgctcatatatcgccacaaacccgacttcttatgttagtgtaactaagaagcaacatgaatagtaattaattaaattcgttcggcgctagctacgttttcaacgggctatttttttacacttttttatttaggagggtttattaacatggttttaacaaaaaaaagaacactatggttatctgttttacttggttcactgagtgcttatggacccctactagtggatatgtatctaccagcatttccgattatggaagctgattttcattcatctgcttccatgattcaactgagtctaactatgtgtttggctggacttgcgattggccccatcttcatgggtgcctggagcgatcgtgttggccgtaaaaagccactcgtaatcggaaccgcccttgcttttacagcgtgtctattatcgttagtcacccacaatatttggctattcttccttttacggtttattcaagggttagcgagctctgcaggacaggtcattactcgagcagtcgctaaagatttatttgacggtaaacaattgacaaaattcattgccttactcatggcaatcaacggtatcttccccatcatttcaccattaataggaagtgctttgctccgtttcacctcttgggaaggtattttcggctttttagggattgttggccttcttctattgttaggcatcattttgggattcaaagaaacacacacagtatccacaagcgcgcaatcggcacaacaatcgcgccttggtattcaagccatttttaaagatcgcccattcatcctatttgttttaattcaaggcctcgtttatggggcaatgttctgttatatttcaggttccagtttcatgcttcaaaatgtctttagtctttctaaatcaactttcagtctaatctacggaatcaatgggattgggattatcttaatggctgaaatgtccaccattttaatccattggtttgatgaattacaacaattaaaaatcggcttaattggtggtttaatcggtgccatctgcgtcttaattagtggctttggctctaatcgtctctggttagctttaattggtttattcctagtggtcgcaacacttggtctaattaatgccgttgtcacctcactggccttacaacgccaaggacaacatgcagggattgcttcttcagtgcttggacttggtatgtatgttttcggcatttttctttccccattagttggcgtgatgggcagttatacctatcttccattagctgttttgattttactttgtgagattggcgcattaatcctttatcaacgtgttatccacatggttcgtcaataatcatctcccccttagacaatagctaagggggttattttatttctacttatcaaaaaagacccgcaactctccaatgaaagttgcgggctactattaatgcgctgattacatttcagcgattttcttatctaagtatctttttaacttctcttttggaaaagcgccagttaccttttctgtcgcctgaccatttttgaagattaatagggttggaacggattgaatcgcatattgttcagctaacgctgcttgatcctctacatcaacggttcctaagccaaactgatcagctaattgttcatgtagttcagtaatcatcggtgtcataatccgacaaggtgcacaccaatccgcccaaaagtctaaaatcactaacggttgtgtttgaacaaagcttgcgatgttctgttctgttacggtttgaatcatgctgatttctcccaacttattatttaattactacaaaaaaggttgaacctttcggctttcgctataaaatgccaaccatctgaccattatcgactattacaatcatcactagcagacatcaaattaatcgtttacaaattaataatataaagtagtatttcacattcttatattttataataaggataagaaattatttttataggaggagtagcatgccatctagacaaccgtcgtattcagccggtaaaattaatgcacgccgtcgtaatccggatttaccaactggcgatgtccaccacgacgccaataactggtttcaaagttcagccgttgaacagcatcccgtcacttttaagaatatctatgaaatgcaagtaactgctaacgtctttcttcccaaagactcgacggaactgtttttccagcactaatcatcggtgctcccatcggtgccgttaaagaacaggcagctaacctatatgccattaagctcgctgaacaagggtttgtaaccgtttcatttgatcaatctgcttggggagggagtaacggtgctctgcgcaacgcgattgcccctatcttatatgcggagaatttctcagcagccactgactacctaaccactctagactgtgtcgccaatgaccgtattggcttaatcgcaattggttcggccggtggtttcgcgctcaacgcactcaaaatagacgcacgtattaaagcacttgcaactattaacttaaccgatatgggtgccattgttcgcgaacagcgtgatgcactaggcggcaacgcattaatcgaggaatcctcacgatcccggacattagagattgcaggtcaagcaaccacttacgcccatggagtacctgaagaactggacgaaaactcaactgatatcgaacgtgaattctacgacttttatcgtacccaacgtggcgcagccaactcgacactccatcccactcgtacaacttttactaaactattagatttctatccattgcgcgacctcgaaacgatcacagaacgtgccatgctctttgttgttggtgaagaggcatggtcacgacatttcagtgaagccgcctttgccagtgctaacgaatcaaaacagttattaaccgtaaaagcagctgggcatgtcgatttatatgatcgtatcgcgcttattcctttttcagaattaactcaatttttcaccaaaaatctataacaacgcaaaaaaataccactgacagcgaattgtcagcggtatttttatattatttatcattcaagtaggctttgactacctgataatttttgaagcccccactcaagttatacacggatttaaaaccgaggttcagaagtaaattctgagcagcattagccgtaacccctttattgcaataggtgacagttggaatatccatatctaattccgtgaaccgatcacgaatttcagcaagcggcatgttaatggcatgttcaacatgctcgtccgcatatttttgcttcgaacgtacgtccagaatctggaagcgttcaccttcagccaagcgttgctccaattcagctggaggcaagagtggccgcccatgcaatgcattatcgagcgccattcccgtatagagcactggatccttagtggttgcatagagtggttgataagctagatcgagatggaataaatcggccaccttcgcacccaatgtgatggcagtcacgaaaacgtcaatccgcttatcaaccccatctttaccaatgatttgtacacctaataattttcccgtttgacggccagcaatggctttaatgacgttttcggttccatttaagtaatctgcatgccctggtttaatgttgtagagtacttccacatcatagtccttagctcgcgcgactgcttcagtaaacccagtctgtgcaatcgttgtatcgaacaaccgaacaatccccgttccaagaatcccgcggtgcgttaagccaccgccagtcaatgaattgccggcaattcgtcccattttattggcagtcgaacccattggtcgatacagtggtgagccatcaattacggagaaactctcaacaacatcgccgaccgcgtaaatattcggtacagtcgtcaacatttgttggtcgaccttcaacgcccctgaaggtcccttagctatcttcatatggtcgaccaactgcgtttgtggttcaacgccaagtgctagtaggaccaaatccgtttgaatggtcgtctgattactcaattctaccgccgataccacaccatcctgcgcagtcacttgttttgcggttacactctttaacacatgcaccccgttagcacgaataacttgttcagcacgataggccatatcaccatcaaaatgggtcataatttgcgcgcttcgttgaactaacgtcacgtccaagccacgtttttgaaattgttccatcatttcaagcccaacataaccggtcccaaaaatcgtcacattttgaactgaatggtgctgtaaatacgcgtcgattgcgcgtgtatctaccatgttatgcatcgtgaagacgttttggtaggcttcatcgaacggtgcaataatgcgtggcgtggcccccgtcgctaaaactaggcggtcataataatcttcaaacaactcgcccgtctcaaagcttttcaagaccagcgcttgttggttttcatcgattgaaatcacttcgatacccgtcataatgtcaacgttgaagcgttttttgaaccacgccgcatcgcgcggaattaacgtctctaggtcttcaacctcaccccctacgtaataaggcatgccacaaaccgaataagaaatatcctgacctttttcataaacgacaatctcatcaacttcactatttcgccgcgcctttgctgccacactcgtccccgctgcaacggagccaatcacaacaatcttcatgatcatcaccaatccttattatatttaaagacaatataactcattttaatcttgaatgaaatccatttgttttcgactcccaaattgcaagaacaaattagccacacgataaatcctattaaatcagtattttcattaatattcatattttatggacttaacttaaccggcggaagcagcggagaaaagctctttgggtgtttgatagccagtttgccggcgcggtaaattgtttagctttgactcaactgcttggatatcatgaggacccaaaatatccatggatagacccttgggtacatcgcagcggatcattcgattatgcgcttcgttagtcccacgctcagaggaacgagatggatgggcataataaaggtcagcgacaccggtaagtacagcgccaacttccgagaactcagcgccattatcggcagtaactgacttcatgattgatccgtattcttgacagatcttggccagctcatagttgactgaatcggcatcacgaccatcaaactttgttctttgaaaactggataataagtaatatattagttttaaaagccgagaaaacattgcgttttaaagagttttttaatagaaatatgaattagttcatatcgctaaactcaaataataaccctttaccgtaggtaaagttaggttaagttataaagggcgcacggtggatgccttggcactaggagccgatgaaggacggtactaacaccgatatgcttcggggagctgtaagtaagctttgatccggagatttccgaatgggggaacccaatacctttagtcgggtattatcattaagtgaatacatagcttaatgaaggtagacgcggggaactgaaacatctaagtacctgcaggaagagaaagaaaaatcgattccctaagtagcggcgagcgaacggggaagagcccaaaccaagaagcttgcttcttggggttgtaggacagaacattggagttaccaagttaagttgtaatcgaatcagctgggaagctgagtcaaagagtgtgataaccacgtagattaaacaacttaacctccgttctggatcctgagtacggcggaacacgtgaaattccgtcggaatccgggaggaccatctcccaaggctaaatactccctagtgaccgatagtgaaccagtaccgtgagggaaaggtgaaaagcaccccggaaggggagtgaaatagatcctgaaaccgtgtgcctacaattagtcaaagctcgttaatgagtgatggcgtgccttttgtagaatgaaccggcgagttacgtttatatgcgaggttaaagtgaaaagctggagccgtagcgaaagcgagtctgaaatgggcgagtgagtatatagatgtagacccgaaaccaagtgacctacccatgtccaggttgaaggtgtggtaaaacacactggaggaccgaacccacgtcagttgaaaatggcggggatgaggtgtgggtagcggtgaaattccaatcgaacttggagatagctggttctctccgaaatagctttagggctagcctcggaatattggatcatggaggtagagcactgtttggactaggggcccgtcatgggttactgaattcagataaactccgaataccattgatttagttccgggagtcagactgcgagtgataagatccgtagtcgaaagggaaacagcccagatcaccagttaaggtcccaaaatttatgttaagtggaaaaggatgtggcggtgcacagacaactaggatgttggctcagaagcagccaccatttaaagagtgcgtaatagctcactagtcgagtgccgctgcgccgaaaatgtaccggggctaaacataataccgaaactgtgggtggacacgtaagtgtccgcggtaggagagcgttctaagggcgatgaagctagatcgtaaggactagtggagcgcttagaagtgagaatgccggcatgagtagcgaaagatcagtgagaatctgatccaccgtatgactaaggtttcctggggaaggctcgtcctcccagggttagtcgggacctaaggcgaggccgaaaggcgtagtcgatggccaacaggttgagattcctgtactagtttattttgtttgaacgatggagggacgcaggaagctaaggaatgcacacgactggaaatgtgtgtctaagcaacaagtcttgagttgagtgaaatgcttgattctttaaggacaagttgtgatggggagcgaaattaagtagcgaagttcctgatgttacactgccaagaaaagcttctagtgagaaataaactacccgtaccgtaaaccgacacaggtggtcgaggagaatatcctaaggtgagcgagtgaactctcgttaaggaactcggcaaaatgaccccgtaacttcgggagaaggggtgctgaccgtcaggtcagccgcagtgaataggcccaaacaactgtttatcaaaaacacaggtctctgcaaaatcgaaagatgacgtataggggctgacgcctgcccggtgctggaaggttaagaggatgagttagcgtaagcgaagcccagaattgaagccccagtaaacggcggccgtaactataacggtcctaaggtagcgaaattccttgtcgggtaagttccgacccgcacgaaaggcgtaatgatttgggcactgtctcaacgagagactcggtgaaattataatacccgtgaagatgcgggttacccgcgacaggacggaaagaccccatggagctttactgtagcttgatattgagtgtttgtacagtttgtacaggataggtaggagccgtagaaatcggaacgctagtttcgatggaggcgttggtgggatactaccctaactgtatgaccactctaacccgcgccacttagcgtggcgggagacagtgtcaggtgggcagtttgactggggcggtcgcctcctaaagtgtaacggaggcgctcaaaggttctctcagaatggttggaaatcattcgtagagtgtaaaggtataagagagcttgactgtgagattgacaaatcgagcagggacgaaagtcggacttagtgatccggtggttccgtatggaagggccatcgctcaacggataaaagctaccctggggataacaggcttatctcccccaagagtccacatcgacggggaggtttggcacctcgatgtcggctcatcgcatcctggggctgtagtcggtcccaagggttgggctgttcgcccattaaagcggtacgcgagctgggttcagaacgtcgtgagacagttcggtccctatccgtcgcgggcgcaggaaatttgagaggagctgtccttagtacgagaggaccgggatggacatacctctggtgtaccagttgtgccgccaggcgcatcgctgggtagctatgtatggacgggataaacgctgaaagcatctaagtgtgaagcccccctcgagatgagatttcccattcctttatggaagtaagacccctgaaagatgatcaggtagataggctaggagtggaagtacagcgatgtatggagcggactagtactaatcggtcgaggacttaaccaaaggtgcaatgttaggcttttgaaatgaaatattacttattatgcagttttgagagaacgaagttcttctcagtgcgcaagcacaaaatagtgtggtggcgatagcaagaaggatacacctgttcccatgtcgaacacagaagttaagcttcttagcgccgatagtagttggtgggaaactacctgcgaggataggacgttgccgcgcagcaggatacgcagatcggtagaggaaagcatatgcaagcaagagaattgattcaaacatttattgaaaaagtgattatctttcaagacacactttataaagcagaagaccaacagtacttatttaatctcgtcttagaccttgttggtgaagaggacagtaacgttgcggtgactgatcaaagtctcatcggattaaaggacgcattgttgcgtcttgcagttgcgaatagccggattgagaatttagcggcagaacaagatattttaggggcgaagttgatggatttggtgacgccattaccaagtgcggtgaaccgccatttttggcatcaatacgagagtgatccccaacaagcacttgccgacttttatgaattaagtcgggccaacgactacgttaaagtggccgcaatcgcgaaaaatatcgcttatcaagtgccgacgcactatggcgacttagaaatcacgattaatttatcgaagccggaaaaggatccgaaacaaattgcgttagccaaaacgatgaaacaaaccggctaccccaaatgtcaattatgtctggaaaatgaggggtatacggggcgtttagatttcccagcacggcgtaatcatcgcatcattcgttttgaattggcaggtcagacttggggcttccaatattcaccatatgcttattttaatgagcattcgattttccttgatggtcaacacgaaccaatggtgattaatgaaacgaccttcaaaaatttattacagattgtgaagcagttccccggctatttcgctgggagtaacgctgatttaccgattgtcggtggttcgatcttaacccatgaacattatcaaggggggcgtcacgattttccaatggctaaggcgccaatcgagacaccactacattttaacgggtataatgatattcaggcgggaattgtgaagtggccaatgtcagtcattcgtttgacgagtgcgaatgcaacgcatttggaaacactcgctgcacaaattttaactagttggcaaaattacagcgatccaagtgtccaaatcttagcccactcagaagacggcacaccacatcatacgattacgccgattgcgcggatgcgagacggtcaattcgaaattgatttggtactacgcgacaatcaaacgtctgcagaacatccagatggaatttatcatccacatgcagatgtgcaacatattaaaaaagaaaatattggtttaatcgaagtgatgggcttagcaattttgccaccacgactcaaagatgaaatggctgaggttgaacactatctctgcgatcaaccaaaccagatggccgcttaccatcaagaatgggcagatacgattaaagccgctaacacatcgattacatcagataacgtaacggaattagtgcggactgaagtcggcaaagtgttcatgcgcgttctagaagacgctggtgttttcaaatgcaacgaacaaggtcaggcagcatttattaaatttacgcaacatgtttaacctataaggagggacattcatgaagtattggcgagaagcatttggagaaataaatggtcaaacggtttggcagtattggctagagaatcgtcaggggtatcaattagccgtgacagaatacggcgcaacgattactcacttggtgatgccggatcaaagtggtcagatggccaatgttgtgattggctatgacaccctagcggattttgtaaagcaacaagcttattttggtgcgacagtgggacgcgtagctggccgcatcggtcaaggtgcttttacactcgatggtcatgattatcaagcaccgattaataatggcgccaacacgaatcatggtggccccaatagttttgaatcgcaaatctggcaatcatcagtggttgaaaaagatgatgcgattagtgtcgttttcatgttaacgagtccagatggtgaaaatggattccccggtaatttagcggtgaccacgacgtatacgctaaatgaggccaatgaatggctaattgactatcaagcaacgactgataaaaccacgttgtttaacccaacatgccatgtctatctgaatttgacgggggactttgatcaatttgttggccaacacacattgcaaatcgatagtgaccgttttggtgccattcaaccagacggcttaccaaccggggaattagtcccagttgcgggctctgtctttgatttacgtcaaccgcgagctttgcaagccgcttttgatagtgaaaatacgcaaactaaattggtcggtggttttgatcatccattcctgttgaatcaaacgccgggtaaagcggatgcgattttacgcgatcccgaaagtggccgctcgatcacaattgatacagaagggaatgcaatcgttatttataccgccaatggcttcggggacgaaccaaacttaacaaatcaggcaattcaaccccaccaagcagtggcgattgaagcccaaatgatgccagatgccatccatcataccgagtttggtaatattgttttgcatcctggcgaacaatatcaacggcggacccgatataaactcaattaatttattttacgcttgcatgcggttacaaaatcgcgtataattgacttgtttagatgaccgattctggtggctagataataattgtgtatttaaaaggagtaacatcatggaaaaaggaacagtaaaatggtttaacaatgaaaaaggtttcggctttatctcagcagaaggtcaagacgatatctttgtacatttcagtgcaatccaagacgaaggcttcaagtcattagaagaaggccaagcggtcgaattcgacatcgttgaaggcacacgtggaccacaagctgcgaatgttgtaaaactttaatttagaggaattaaatacgactattctaatttaatttaattaaatttaaattagaataaaatcgttcatgtattttattcgagtaattgctatgggagcggttatttttattcatgtctctgatggaatagaaatgcagcagagcttaaacagccaaattattaaagaggtagtcgaatctttggtgttgttatgtaatccattattttttatgatcagtggacatttcaatttacattttaaaggcaccagccgaagcgactataagagatattatttaaaaaaattatttaatgtggtcataccgctagttatctatcagttcatgttttactgtttcacgaattatttaacacatcaacaaatgggaattaaactatggggatggaggctgattttagatatatttcaagattatacaacgaactatttttggtttatgtacccgttgattgcatatttgatcgcagcaccatttttgagtaagatgttggagaacctgacggataaagaagaaactatttttacctgggttttaattattgtccagacaagtgggtggttactaaaactgattaatattaattggggattaattagttttcctttttctaattggcttatctatttcttacttggtcgacttttagaaaagaaatggaatgtaattccatgtatggaaagtggtttaattatagggatggttgttgtaattaatgtaatattgactgttatttttccacaatcaaagggctgggggcttcatgatttgtcgccaatgtatctattgttggcagtagttgtctatcagggtatattaaggagtacactttgcaaaaaaatgagtaatagtaaactcgtagtttttttagcacactattcatatggtgtttatttagggcatggaatagttttattattaataacgccttatttaagattcagtagcggtattctgagcataatagttacattttttgtggcatatctaatttcagtaatgtttgcaatactgatagatagtttaatcattaaacaggaaaaacgaattcttttaagaaaattttagtagattaaattaatggttttaaataaggacattttgtgctgccttgttataggtgtaaactatattatttgggggataagacagtgaagcaaaagtggattaagttatctatcagtggagcattatttctaagtgcatctgttatgttattgaatggtcaagctagcgcagcaaccgtgatgacacctgatcagatgaaatctcaattgacagaacaagatattaaagaagcaacgcctactggaagcaaagaaacggacagtgatggaaaggcgaccgatgatattgggatgccaatcgaaacaaaatcaagtgcttttagtggagaaatatcgagaagttatcctaacgttaataactatattttacaaaaaaactatcaacatccaaatattactcaagaattacacactttctcaatgtttggttataagaccgatgatgtattaccatctggtgtggctgttcattacacggataatcccaataattttagtgcacgaagtgaagcagattatgaaattaatggtggatggcagtcagcttttgtacacactttcattgacgccggaagtatcttaagtattcatgacactaattatggggcttggggtagcggtgctattggtaacaagtatttcacgcaattcgagatggtgacagcccgtgattttgaagattttgccaagacaacgagttattcagcctgatatacggcatacttgttacatcaatacaatttgacaccgtcgttagctcaaaataataacggtgttggaacagtttggtcacatagtaatatttcacattatcttggtggaacagaccatacggatccagatgcctattttgcaaaatacggttatgatatgaatcaattctttggattagttcagcaatactatggtgaaatgaataaaaatgttgcttcactaaataacttgagtgtaagtggtaacaatttgcatattagtggctggcatgccgcaactgaatctacaataaaaccatacagttacatttttatcatggatgctgatacaaatagggaaattcagcgagtgaaggttgatcgtacacgtagggatgacgttcacaacgcatatgctgatgttcctaattctataaatagcggattttcagtagatgtaccattgacgaacagtattattggacatcgaattagaattatttctagatatacggatgattttagaggtaatggaaattctgtagattatggtttccataaagcgattaaagttgataaaccaattgaatcagccgctagtttagatagtgttgcttatgtaaatggtaatttatcagtaagaggttggtttgctgataaccaaagtgtaggtaaaccttatcggtatttagttgctttagatgcaactaataatcacgagttaggccgttaccagatggcaactgtcccccgtcctgatgtaggcacgatatataatggtattgctaatactggtcagagtggatttgtggccaatatgtctgtaaacagtggtatgttaggcagaaatgtcagatttattgcgcgttactcagatacgcctaatggtaatggaagtttcgtcgatcactggtttgagaatattactaaaattaaagatggtacaaatcaggccagcctagatgattttaaattgaaagaaacagctcaagaacaattaatcgtcaaagctgatgatccagtgaatctttaaaatcttgtgaataacgaattgacataaaaatactcctatactttcattttacggactgaataaaaatagtccatttttttagtataagagcatttatcattgattgcatcattaggattgacgacattgattatgcaagatggtgttttccatattagtgaaggatcaccaattattgcatttttgccagtcattatgattggaattgtcttcggtctggcgatggattacgaagtgttcatggtctcacggattagggagacatacattgccactggagatacaaatcgggctgttaaaacaggattgcaagagagtggtccagtcattattacagccgctttgattatgattgctgtctttggaagttttgccttggttgaagatccaacgattaagtcaattggtatttcattagccagtggggttctatttgatgccttcttggttcgtctgattattattccagcgacaatcaagatattcggtcgtgctaactgggtattcccaggagcaaattactataataagtttaaggatgatgcgcaataaataggtattgtggcattaaaaatattttttttgggagtgattttaatcactccttttttgtttgattatgtcgcatttttgatatctttactatttataaaacaatacgaataattttatttttgaggtaataagatatagaatggcactaacttgtcgtttaatattcataaaaattatgggggagtagctgtgataaaaaccaagataactagtcttgtcattgggttgattttgggggcaggcttagggttatatggcaatattgatgatgatgttatggctgcaaaaactgatagtcaaacaactaagacagtaaagcaggcaaaatcattaagtcaacagtaccaatataaagaagcaaaatcagtgttatcggggcacaaaggaacaacagttgatcatctaaaaaagagtattaataagcaacagtcaaagttggtcacgtgggatgatccgacaaaaatttcacatcttttttatcattcactaattgttgatcctggtaaagctttctcatctaagcaggcacagggatacaaagattatatggtgaccatcgacgaatttatgccgatgctgaatcagttatatgataatggctatgtattaattaactttaaagatatcatttcgattgataaacaagggaaggtgactttcaaaccagtcaaattacctgaaggcaagaagcctttaattatatcacaggatgatgttaactattatgagtatatgaagaattctggatttgcagataaattagtcgtcaataagcaaggtgatgttaaaaatcaatataccaataatggtcagaagaaaattggtgattatgacatggtaccgattattgataccttcatcaaaaagcatccagatttctcatacggtggctcaaagggtgtgattgctgaaacgggttataatggggcgctaggttatcgttcatcaaagagtcaatatggtgatacaaaaaagacacatcgcgaagctaagaaagcgacaaaggttgctaacgctatgaaaaaggaaggttggcagtttgcatcgcattcctggggtcatataaatatgactacggccagtgttgatgatatcaaaaaggacactgcactttggcaaaaggaagtacaaccaattgttggtaaaacaccagtattgattttcccatttggagcagatattggctcatttacaaattatacaaatgataatgcaaagtacacttatcttaagagtagcggtttcagtattttcgataatgttgatgcgtcacagacatcatggggtcaattaacaaatgattattatcgtaatgcacggataaatgtcgatggtattcgtttacatgaaacaatgactggtgagaacacggttctaaatgacttctttaatacaaaagatttttatcatcgtgataaataatgaagagcgcgagacaaaagtcgtcaacaaaaaattgggttatttttcaaacagttagacaacactatcactcttcatcaacgtaagttagatttgttgaaagaacagaaaaaaggctttttacaaaatatgtttgtatagggtctataattataataggtggaacttatggtgtttatccagaattgttaatggaagcggatcggtgcgttcgtgaggatgaccttgaaaaagctcttcaaattcaacttaaaattaatgatttaatttcagaattgacatcatttaaaggtaatttatatgatgtgatgaagttaatcttagctaaacgtggggtaagtgtaggacgagcacgtaatcctttaccacatgtagaagatgatgaaatggatcatgttgaggtagtacggcaacatattgatgatgcaattgctgaatttactaaataataaaaaaacgccgagtctccttaaaagaggctcagcgttttttagcatagaaatataaagttgcttaagtgataaagattgattaccaaactaaaaagacgatttccataatatatggaaatcgtctttttagttcagattctgcttttgaattgtaatagtaagttgtatccaataaatataataagcgaagttatagaaattagaagtgtcagttttctaatagaactcatttgataggtgattgtaatgtgatggtttcctgtcctatgcaataaaatgcatactgttccgcgatttgaacgaatggttgggatagtatagccattatcggtgactttaacacccttgtagcgaatgactggagtatcgatcgtagcagaactggatgacgtatgatagttaaaataaaatgattgattagtgtgcttgagagagggactatcctgatagttattgttattcaccttaaacaatttttgattaatagtttgtaatttggataaattgatgtttgggtgatagtcgtagttattcggaggggtaatcgtttcataagttaatttggaattctgagagccatgttgaattagattagtacttgtttgtaaatgcaatgtcataattaagatgaaaagtagtagtaaggagtatttacgagttgaagtaggtaatttatttaataatttagaaaatataagtgtacctgaaaaaattataaaatagtttgctaacattaggaatctaaaaggaaactgaataatattaaagggtggacgattcaacaaataccatgggaacagagaggtgctcaaaatgattgccattaatccaatgagagcatctattgatacataattaaaattatgaagtaattggtaactgtaatgtagaattagtatggctaaaagaagtacgattaaaccaggactaatgacgtcgggggcaatatattgatttgagaagctactttgaattagtgttgcaaaactcgcagttttatcaagaagattaacagtcacaacagagcgtaatggttgataatgatattgttcaaaaatggagaatagttgaaaagaggacagtaacagagttattgttgttgctttaataagtgaaatgattagttgctttgatagattagtgatacaaaataataggcggaataggatgaaaacgctgattgtgagtagtgatagaatatggctgtaggtaactatcgtcataccaatagttagcataggccatttatagtaatctccacgaattaataattcaagtccacaaaaaactagtggtaaggctgtaattacaaatagttcacctaaatctgcacgaaaaaaactgtcaataatacgatatgtagagaatgtgtagatgacactaaaaataagtgcaggcagcttagctttagtgattgtcagaatagcatagtaagcaattagcagtgttgacagggtgacaatccaataatagataatataggcggtaggccaactacctaaaaataaacggaatatggcgattggatagctatttaataaataaggataaaaaaggttgtaggctgatccgtatgagccaaaagctgagtaatcaaaattaggaattaaatgtccagattttaatgtgttatacaggctcaatgtgcgtggcatatggaaagaaaaatcgtcacttgcaaatagaatttcaggatgaactagaatgggtaatataaagattagacttaatattataaatcctaaaagaattaataaagtttgtttctgtttacgcaacatgaaatataaatcctttcgcttgaaatatagtattggtaatgaatatatgtattatacaataaatagtaacagtaagtcgtacaaatatagaaaccgagatatgatatactttttttgaacaatagaatttctaatatctatttaatgaaatatcgaggggatggtttcttttggaacgtaaacgtgatttaaggtatgattgtttataaaaaaatagcataaaagtgttgacttcatttatcatgtgaactatgataagcacataagttaataaagcgattgaaaagcgcagtagaattagtaaccactattacagagagtcgggatttggtgagacctgacatatgtttctaagtcgaattacactttttgttttatcaaatcgtacgttgaatttacgttaaaatctagagtgatattttgaaagtgcactttcaaaatataacacgggtggtaccgcgaaaaaatgacatttcgtcccagtaatctttattttattaaagattgctgggacttttttaatttaggaggaaattttgatgagaaaaaatattattgatgaattaacatggcgtgatgcgattaaccaacaaacagatgctgaaggattgcgtgaattagtagaaaacaacaagatttctttatactgtggggctgatccaactggtgatagtttacacatcggtcatttgattccattcatgatgatgaagcgattccaattagctggacatcacccatacatcttaatcggtggtgggacaggatcaattggtgatccaagtggtcgtaattcagaacgccagttacaaacaatggaaaaggttcaaaaaaatattgaagctttatcaaaccaaatgcggaaattatttggtaaagatgccaatgttacttttgttaataactacgattggttatcaaaaatctcattgttggactttttaagagattacggtaagaatttcaacatcaatacaatgttagctaaagatattgttgctagtcgtttggaagtggggatttcatttactgaattcacataccaaattctacaatcaattgatttcaaacacttacatgatgaacataacatccaactgcaaattggtggggctgatcaatggggcaatattacttcagggattgatatgattcataaacttgaaggtagcgacgaacccgtatacggtttaacaattccattaatgttgaaagctgacggaactaagtttggtaagacagcaggtggtgcaatctggcttgacgctgaaaagacttcaccatacgaattctaccaattctgggtaaatcaagatgatcgtgatgttattaaataccttaaattcttcacattcttagaagaagacgaaattgaagaattggcacaaaaagttgcaacagaacctgaaaaacgtgaagcacaaaaacgtttagcacaagaagtgacacgttttgttcacggtcaagaagcattagatgaagcggaacatattactgaattactttttgaaggtaatatcaaagctttagatgttgttgaagcagaacaagcttttggtaaagcaccatcagttgaaattagtaaagaagctaaaaacattgttgacttcttagtggatacaggtattgaatcttcaaaacgtcaagcacgtgaagatgttcaaaatggtgccattacaattaatggtgaccgtatccaagaaactgatgcgatgattgacccgatgactagctttgatggcaagtttgtgattattcgccgtgggaagaagaattacttcttagcacgtgttactgactagagacgttccaaaaattaaatgaaggcttttgtatctatactgaatgttactgggttcttcgtgaatgtagatcatatagtataaccccaaaatacaactgcaaaggtagccgtcaaacgttgtttgacggctatttttcgtactctaaaaaatcggaatcgctttcatatgtttgcttttatggacaatgagcgtattctattgattggggttatactaaaacatatttgcaaagtcaatttcgctagcaaataaattaagtaacaaaacaagagctacaaacttttaatcgagagtttgatcctggctcaggacgaacgctggcggcgtgcctaatacatgcaagtcgaacgcactctcgttagattgaagaagcttgcttctgattgataacatttgagtgagtggcggacgggtgagtaacacgtgggtaacctgccctaaagtgggggataacatttggaaacagatgctaataccgcataaaacctagcaccgcatggtgcaaggttgaaagatggtttcggctatcactttaggatggacccgcggtgcattagttagttggtgaggtaaaggctcaccaagaccgtgatgcatagccgacctgagagggtaatcggccacactgggactgagacacggcccagactcctacgggaggcagcagtagggaatcttccacaatggacgaaagtctgatggagcaacgccgcgtgagtgaagaaggttttcggatcgtaaaactctgttgttggagaagaacgtatttgatagtaactgatcaggtagtgacggtatccaaccagaaagccacggctaactacgtgccagcagccgcggtaatacgtaggtggcaagcgttgtccggatttattgggcgtaaagcgagcgcaggcggtttcttaagtctgatgtgaaagccttcggctcaaccgaagaagtgcatcggaaactgggaaacttgagtgcagaagaggacagtggaactccatgtgtagcggtgaaatgcgtagatatatggaagaacaccagtggcgaaggcggctgtctggtctgtaactgacgctgaggctcgaaagcatgggtagcaaacaggattagataccctggtagtccatgccgtaaacgatgagtgctaggtgttggagggtttccgcccttcagtgccgcagctaacgcattaagcactccgcctggggagtacgaccgcaaggttgaaactcaaaggaattgacgggggcccgcacaagcggtggagcatgtggtttaattcgaagcaacgcgaagaaccttaccaggtcttgacatcctttgaccactctagagatagagctttcccttcggggacaaagtgacaggtggtgcatggttgtcgtcagctcgtgtcgtgagatgttgggttaagtcccgcaacgagcgcaacccttattactagttgccagcatttagttgggcactctagtgagactgccggtgacaaaccggaggaaggtggggacgacgtcaaatcatcatgccccttatgacctgggctacacacgtgctacaatggatggtacaacgagtcgcgagaccgcgaggtttagctaatctcttaaaaccattctcagttcggattgtaggctgcaactcgcctacatgaagccggaatcgctagtaatcgcggatcagcatgccgcggtgaatacgttcccgggccttgtacacaccgcccgtcacaccatgagagtttgtaacacccaaagccggtgaggtaaccttcgggagccagccgtctaaggtgggacagatgattagggtgaagtcgtaacaaggtagccgtaggagaacctgcggctggatcacctcctttctaaggaataatacggaaaaccttgtacatttgcgaagtcgaaactttgtttagttttgagaggtctactctctagtgtaccactgcgtctgtcttttgaactaacttatcgactaattcagcgtcacagatatcgccaacaactaattccacacggtctgcgggtaaaccggccaagttcgcacggttcccagcgtaagttaatttatctaaaaccgtcacgtgaacttctgggtggttattaaccacatagtgcacgaagttagaaccgataaagccggccccaccagtaacaataatatttttcatagtgtgttgatctccttaaatttcaccgtaaacaaacggattgtctttttcaaattcagtaaaagttggttggttggcatctttttcagacgtaattgcttggtcaaaatcaattggccaatcgatgtttaattctggtgtcttgaatgaaataccgccgtcagcttctgcatcatagtagccatcacatttgtacaagaagttaacgttatccgtcaaagtgacaaagccatgggcgaagccctttggaacaagtaattgacggtgattgctggcagaaaggatgtacccttcccattgtttgtaagttggtgaacctgcacgaacgtcaacgatgacatctaagacagccccagtcaccacgcgaattaatttcgtttgcgcagctttgccgcgttggaaatgtaacccccgtaaaacaccagcttgcgttgaaagggagtgattatcttgaacgaaatcaatatcaatcccagcttctttgaaatcgcgatctgaataagattctgtaaagaatccacgatgatcaccaaagacggctggttcaataattttaacgtcttgtaatttagttgttgtgacttttaacttacccatgattacttacccctaatcttcttttactaatcgcaataaatattgaccgtagtcgtttttcttgagtggttgcgctaattcaatgacttttgccttatcgatgtaatgcatgcggtaagcaatttcttctagacacgccactttcaagttttgccgtttttgaacggtcgcaataaaactgctggcttcttgtaatgaatcgtgggttccagtatctaaccaagcaaacccacggcccattaattcaacatctagctggcctttttcaagatacgctttattgatgtctgtaatttctagttcgccacgtggtgaaggtttaatattcttcgcaatgtcgacaacttggttgtcgtagaagtataacccagtcaccgcatagttacttgccggatgttctggcttttcaacgattgatttagcatgcatattttcatcaaaatcaacaacgccaaagcgttctggatcattcacatgataaccaaaaacggttgcgcctgattctttttgagccgctctttggagcatttctgaaaggccaccaccataatagatgttgtcacctaagattaagcctactgaatcatcgccgatgaagtccgccccaatcacgaaagcttctgccaaaccattgggttgttcttgaacggcgtattcgatatttaaccccaaatcattgccgttgccaaataactctttgaaccgtggtgtgtcagttggggttgagataatcataatatcttgaatcccggccaacatgagcactgacattggatagtaaatcattggtttgtcatagattggaatcaattgttttgataaagcgcgtgtgatgggatacaaggggcaaacgtcaattgataacgcggtgagttttagaagagtatcaaatcaatgagtagttcaacccggttgaagtttgttcgttaaggtctcgagttttagaagagtatcaaatcaatgagtagttcaacaatacaaagaggaaattaagaagcaggcgtgttttagaagagtatcaaatcaatgagtagttcaacttcttgttggttgtcgcgttgtgatggatagttttagaagagtatcaaatcaatgagtagttcaaccgttgttcagtgaatgggctgttcttgttggttttagaagagtatcaaatcaatgagtagttcaacttgattatagtcgtctgtaatccataatatgttttagaagagtatcaaatcaatgagtagttcaactcctgtggttgcacatttgttccacatttagttttagaagagtatcaaatcaatgagtagttcaacaagacttggctcacgcattaacacagatgggttttagaagagtatcaaatcaatgagtagttcaacagcgttgactgtgatgtcttctgttgttcggttttagaagagtatcaaatcaatgagtagttcaactcaaagcaacagccgaccataagtttctgagttttagaagagtatcaaatcaatgagtagttcaacttacacgttaacgggcttttaatcattgctgttttagaagagtatcaaatcaatgagtagttcaacaatatgtatctggtattgatgtatctattggttttagaagagtatcaaatcaatgagtagttcaacactatccatcttgctaaagtcacgacctgtgttttagaagagtatcaaatcaatgagtagttcaactacaaccttaaatcccacgcttgatggtctgttttagaagagtatcaaatcaatgagtagttcaaccgctcgtatttaatgtatgttgatctttgagttttagaagagtatcaaatcaatgagtagttcaacagaattctggtcgtgcgaatgtccactctggttttagaagagtatcaaatcaatgagtagttcaaccacatttcccgaataagacatcagtgccgtgttttagaagagtatcaaatcaatgagtagttcaacgttggccttagctttgccggcattacagcagttttagaagagtatcaaatcaatgagtagttcaaccggtattgctcctatgtcaataaatggcacatctttttctaaacactcgttctaattctgtcggaattaaaccaactgatgtaatttgaggttcggattaccaagtcctcaaaattggaaaaagttgtttgaaaggcaaactctctcttcaacaatgagtgaaaagcttcaattggcccattatcataaggataaccttgttttgagtatgagtggctaatctgatgccgttcaagtaaagtttcaacttcgttgctggtgtactgtgaacccatgtcagagtgaaaatattgtggcttttgatgacattcaagcgcctgattaatcgtttctacaactaacgtcgcctccatctgacgaccaatcttgaaagcaagaacttgatgaacctttggttcgtaaatagaactgagataaacccaggttcctggacgtaattccaaataagtaatgtcagcacgccatatccttgcattgggctggtgcttgattaaattggggcgttgtgaatgatccacatgagtgccaggttttttaaatcgccgattcattaaagagtgaatctccatttccctcattaatcgtaaaattcgttttgacccaacacagatgcctgacttgcgaagcaccatcgttattcgtggataaccataggcacgataattattttcccaaatcaatttaattttttctttgagttgattatcaacacgttcgtgttgactaggttgatatcttttccaatggtaataggtgctgcgcggtaatttcagtgccgaaagaataattgataagcggtgtcgcaataactgatcttctatgaagacaaggcaattaattcgtcctaatgctttcccagtaacaccgccgcagcttttaaaatttcgagttcctcctttaatcgctgattttccttttgaagttgtttgaattctttggacgttacttcagtaccgtcttctagctcaactgatttagcgcctttaacccagttatgaattgcggctggagaaacaccgtattcctcggaaagcgagcgaatagatcttttctcttcacgatgcatcttcacaatgctggctttaaaatcatcttgatatcgtttcattggaatgctcctatcttgttttattaattatggcacaactgttcagaaatttatgtaccaaatactaggataggagcaggtcactaagtggattaaacaagctgatcctaacaacactaaagtgctatcatcaaatgaacgtgctctgattaaagaaaataaacggttaaaagaagaacttgatattttaaaacgagcggcggtgctcatggcaaaaagctaattattaaagggcgtgccctcgtgttagaagtcgtcaacgctaatttacttgctgggcaccgcattacgcgtatcttatcagtactcaaaattccgcgctcaacctactatgattatctacattggcagccaagtagaactgaacgccgccggcatttaattaaacaagaagtgttaacggcttggttaagatatccaatgtatggctacccacgattaacgatcttactaaatcaacagtctgatattcacgttagtcagcgtctggtctatcaacaaatgtgtgaattagggattagatctagaatggttaaacgaatcaataagccaaccactcagactgattatgatcagcgaccaaacttgattaagcagttaactgatcaatctggtattttattgactgatattacgtacattccccttaaccatacttggtgttacctagctagtgtctataatccagtaacccgacgggttattgcttaccaacttaatacgcagatgactaaagaactagcgactaacgttattacccaagtcatggcgcaagcagttaaaccacaaattattcatagtgatatgggaagccaatacacaagtgacttatttgaaaacactttatcgaagtatggtatcaagcattcttactcccgaaagggtcagcccggcgataacgcgcgaattgaaagttttcattcaattttgaaacgtgaatacgttaatttccaagattttaagacaattcatgaagcaatcgccggaattgataactatattcgttggtataacagtgatcgtatttcacttgtagcgtagctacaggctattaaattcaataatgttggggcttatttaatatactctaaagcgtttttaaaatctgaacgggactaaaacttcggcctccgaaaattaaattaagtaatttaaattgaaagtcaaatttgttcgtacttttatgtccggattcttgacataggagcctgccgccgaaagccacaacgataactctttaaaagatccttcaccctttattcaaacgaacatcatcggttcatatacgttgatcgaagcttgtcgcaagtataatgtgcgttatcaccacgtttcaaccgatgaagtgtatggtgatttaccattacgtgaagacttacctggtcacggcgaaggcgttggtgaaaaattcacgcctgaaacgcgttataacccaagtagcccttattcatcatcaaaggcgagctcagacttgttagtccgagcttgggtccgttcatttggcttacaagcaactatttcaaactgttcaaacaactatgggccttaccaacacattgaaaaattcattccacgtcaaattaccaatattttaagtgggattcgaccaaaactttacggttcaggtcaaaatgtgcgtgattggattcatacgaatgatcattcaagtgccgtttgggcaatcctaaccaaaggtaaaatcggtgaaacctacttaatcggtgccgatggcgaacaaaacaacaaagatgttttggaattaatcttagaattaatggggcaacccaaagatgcttacgatcaagttaaagaccgcccaggtcatgacttacggtatgccatcgattcaacgaaattacgtgaagaattaggctggcaaccagaattcactgattttaaatcaggcttacaacataccatcgactggtatcgggagcatcaagactggtggcaagcagaaaaagcagccgtggaagccaactacgctaagaatggtcaataaatatgaaattaaatgagagtaggcgaacgcctactttttttaaggagaagagttaacgatgaaaattttaatcaccggtgcaaatggtcaattagggaccgaattacgacatttattagacgaaaaccaaatcgaatatgtggggacagatgcagccgaattagacattactaatgcagacgcagtcacaacatatggatgatttaaatgccaattccaggcagtttcaataattgcttccatattgtcatactgtggcgtccaacctaagacttcgcgtgctttgtcacttgcggcaatcaaagtacttggatcaccagcacgacgcggtgccattgtcacaggaattgccttgccagtcactttgcgagcggcttcgacaatttccatatttgaaaaaccagttgatgagcctaagttaaaggcgttactatcatggccttcttcgaggtaaccgagggccaaaatatgggcgtcggctaagtctaacgcgtggacatagtcgcggacgttagtgccatctggtgtatcataatcatcaccaaagatggagagttgttcacgtttgccagcagccacttgtaacacgattggtaacaagtgggtttctgggtgatgatcttcgccgattgaaccatctggtttggcaccagcgacattgaagtaccgtaatgcaacgaatttaataccgtaagctctgtcagcccatttcatcatcgtttccatcattaatttactttcaccatacgggttagttgggacttgtgggtcggattccttaattggaattgatttcggttccccataagtggccgctgttgatgaaaagacgatgtgtttgacgtcgaattcattcatcacttcgagtaaggcagtcatgccgtatgtgttattgtcgaaatatttaagtggtgcttgcatcgattcgggcacgattgagaaagcggcgaaatgaatcacaccgctgactttttcttgttggaagacgctgcgcatgaaatctttgtcgcgaatatcgccttggtaaaagcgcgcttgtgaattaatggcggcttgatggccagtgacgagactgtcgacaacggcgacatccgtgccgcgttgaattaattgatcaacggtgtgcgagccgatgtagccggcgccacctaatactaaaactgtcatataccgtgtaaatcttttcccgaatacgaatcgacttaggactcatatcgcctttgattgctcggttcacttgagtcgggttttcaccgattaaatcggataaatcgcgctgactcattccgcggttaagtaaattaatcttaatctgtttttcaaccgctttggctgaatctaaaagtgcttgttcattcatctttttaccctcctttgtaatttattcatcaagttgttgacaactaattagacttagtctaatattaaggcatacgaaataagctaataaaaataattcaacttccgttttctcgccaaagtaacgttatgaagctgtcggttttttatcgcttaattacttgatgaattaatcataagccttagtctaatttttgtcaataattaattagtctaagtccaattaatttgtcataaacattggaggaaatgttgatatgacaactctagaacgaataaaagaaatttcaaaaaaacgtggttatagtttaacaaaggttaatgaattagcaaatctcggaacaaatactatatattcatggaaaacaaaggaacctagttttaataatttaaaagctgttgccgatgttttaggtgtatctacagactacttgctaggtaaaacagacaatccatcagccactaataagccaaaagaagtagatattgaagacgaaaatgttctcatgacttttgatggcaaaccaataccagaagaggatatggaaatcataaaacggctactacgggggaaatagcatatatggataatataatcaatgatttgctaaattatgcattagataaaggcattgggttaattatgaccaaagagttatctcctgataccacatcatttgccgatattaatcgcaatcgcattgtttttaatttgaatttcgggaaaacaggattcgaacctgcgaccccctggtcccaaaccaggtgctctaccaagctgagctatttcccgttatatgcacccagtaggagtcgaacctacaaccttctgattcgtagtcagacactctatccagttgcgctatgggtgcatttttcattatgatgccgaggaccggaatcgaaccggtacggtagtcacctaccgcgggattttaagtcccgtgcgtctgccagttccgccaccccggcttaatcataatgaaagcggaagacgggattcgaacccgcgacccccaccatggcaaggtgatgttctaccactgaactacttccgcatcttaatgccgactagacgattcgaacgcccgaccctctgattacaaatcagatgctctaccaactgagctaagtcggcataataagataactttcattgaatattcaattgaatgcgggtgaagggacttgaacccccacgtctatatagacactagaacctaaatctagcgcgtctgccaattccgccacacccgcattttggcgtgtaacttggccgatgagtcgtgacaggctcgaactgtcgaccctctgattaaaagtcagatgctctaccaactgagctaacgactcaatggaggttacagggctcgaacctgtgaccctctgcttgtaaggcagacgctctcccaactgagctaaacctccatcaataaaaatcatcaatccaaaccgatatttgtgaaactagcgtttcataagtatcggtttctttttggtagaaagcttcggctttcataatatggaaaaagctctccattgctgcattatctaaacatgttgctttgcgagacatactttgaaaaatgcgatgttctttcaagatatgagtccaatcttgatgctggtattgaaatccttgatctgagtggactgttgtccggtattttaaattcttagggattttcttaactgctcgattcaaaacagttgtagtaaattcaacagtagggtgtttactaacttgatggctgagaatttcacctgagaataaatcataaatacatgtgaaataggcgcgttcatcaattgtcttggttccccagcgaacttcagtaacgtctgttactagtttttgataaggacgatcagtgaagaaacgacggttgattaagttcttagcaacggtgccaacattgcctctatatgaattatatttacgagtacgtttgttaaatgcagttgatagtaattgcagttctcgcattaagacaagtacttttttatgatttactaagatattcatacgatgtaattcaccagttacacgacgataaccgtacgctggatgattcttcttgattatttggatggtttgtttaacagattggtcagatgaaccgttcggttcatgactaataatgtataccaaactaaaaaaataatcatttggttattagcattaataacactaataacttactctagtaaaatttttctatataactattcaattgatactgaacaatttatgaataagggtatcccattcaaatggtggattagtctaggtcgctatgggttagcttttttatcaaaacttactacagtcggaattgatttaaatgtaacgctcacgaatgttataacctatttactccttttcactagttcagtcatcctatcatttattatatggcgttcagaaaataagataaattcattttgggtagttattgctgcagggttgtatctaacgtcgccaacgatgttagaacaaactaatttcgttttgcaaagtatggaagttacttttgcgtttaacttattatatatagcgatcttattcattcaatactttattgaaacaaaacataaactattctttgctcttgcaataatatcgacaataattgcattctcaatctatacatcattacaagcagctttcgttgtggtgactctgctagctctctatttacactctgattcgaactcatattttagctacataaaaaatgcagtgccttatgttatagttctcgttgcctccacactgttcaatatagtcgctacaaaggcaatctcaaaagccttaaatatacctaaaaataattatttttttggaggagtagcgaagtggctaaacgcggcggactgtaaatccgctccttcgggttcggtggttcgaatccactctcctccatattttttagggatatagtttaaaggtagaactacggtctccaaaaccgtcagtgtgggttcaattcctactatccctgtttatattatagcttgcatattatgtgtgaatgtagtataattattcatgttaatgatggcggtattggtgaagtggttaacacatcggtttgtggatccgacatacgtgggttcgattcccacataccgcctttattcttgggctatggccaagcggtaaggcaacaggttttgatcctgtcatgcgctggttcgaatccagctagcccaatttactttttaagggacaggatttgttcttttatggcggtatagccaagtggtaaggcagaggtctgcaaaacctttatcaccggttcaaatccggttaccgcctttgcgtttaggcgctaaccttaattggtcaaaatgccggtgtggcggaattggcagacgcgcgggattcaaaatcccgtttcctcacggaagtatcggttcgaccccgatcaccggtataattgaacattatacagttttaaaaagccttagagatagggctttttttgttgcgttaataccatggttcttttgaatactaatagttaatctggataaacacattcctttttgagggaagcgtgaaaggattccattggcgcattatcatacggataacccttacggctgtatgagtggcggatatgtagctcagttaaacgttgattgtaatcatcgctggtatactgtgatcctaaatccgtatggataatcaggtccccagtaatggttcgatttttaaccgcgctttcaagggtctttaagactaaatcagtagccatcttttttgagaacgaatagccgataatccgtcgtgagtgcaggtccatgatggttgataagtaacaccagccattacgcttcgtttgaatataggtcatatcagcggtccatttttgatttaaaccagtggtcgagaaatcctgcttaagcaagttgggacgctgttcaaccttggttttggaagccgaagccgctttccacttattgacggtaacggagtggctatccagttccttcatgagccgggaaatccgtcgtggactgcaccgaagctgcagtggttgaagttccagattcaattcatggtggatcttcataacaccgtatcgctgcttaaattccgcaaagatccgcagaatccgttgtttcaagcccgcatcttcggcccggcgttttgaaggtttgggggatcgataacgataatactgagctctggaaacaccattgcgggagtagggtttgaacctacgaccttcgggttatgagcccgacgagctaccagactgctccatcccgcgataatataaaggagaatgagagattcgaactctcgcgtgggcagaacccacctgacggttttcaagaccgttcccttcagccagacttgggtaattctccataaaacatataaaatgtaacattgttacaatgacccgtacgggatttgaacccatgataccgccgtgaaagggcggtgtcttaaccacttgaccaacgggccatacaaaacggagaaggagggatttgaaccctcgcgccagtttcccgacctacacccttagcaggggcgcctcttcagccacttgagtacttctccatattatttagataatgggcctaaatggactcgaaccatcgacctcacgcttatcaggcgtgcgctctaaccagctgagctataggcccatgaaaagcgggtgacgagaatcggactcgcgacaacagcttggaaggctgtggttttaccactaaactacacccgcatattcatgatctcgcaaattcataccaagtacatgaattgtcatttgaaagttgatacaagccatacggcacgtcgttttgaacagcgtataacatgaattcagccaacgtccgggtccaagttggacgaccgacttgatcactaacgactgttaaatgatcatgcgtcttcgcaagatttaacatcgtgtaaacgaagttcttaccatattcaccaaagacccatgaagtccggatgatgtagtatttgctcattgtatttgcaacggcttcttcaccagccaattttgtgcgaccatattcattcttaggtgcagctggggtttcttctgtgtacatttgatcattcgtaccatcaaagacataatccgtactaatgtaaacaagcgttgcgccgattgcttcagcagcattggcaatgttttgcgttccaaccacgttcactttgtaattgattgacttgccaggttcttcttcagcagcatcgacagctgtataagctgcgcagtgataaaccaattcaggcttgttcttttcaaa
